(19) United States
(12) Patent Application Publication
(10) Pub. No.: US 2002/0048800 A1
(43) Pub. Date: Apr. 25, 2002

(54) Myosin-like gene expressed in human heart and muscle

(76) Inventors: Yizhong Gu, Sunnyvale, CA (US); Yonggang Ji, San Mateo, CA (US); Sharron G. Penn, San Mateo, CA (US); David K. Hanzel, Palo Alto, CA (US); David R. Rank, Fremont, CA (US); Wensheng Chen, Mountain View, CA (US); Mark E. Shannon, Livermore, CA (US)

Correspondence Address: FISH & NEAVE, 1251 AVENUE OF THE AMERICAS, 50TH FLOOR, NEW YORK, NY, 10020-1105, US

(21) Appl. No.: 09/866,108

(22) Filed: May 25, 2001

Related U.S. Application Data
(63) Continuation-in-part of application No. PCT/US01/00666, filed on Jan. 30, 2001.
(63) Continuation-in-part of application No. PCT/US01/00667, filed on Jan. 30, 2001.
(63) Continuation-in-part of application No. PCT/US01/00664, filed on Jan. 30, 2001.
(63) Continuation-in-part of application No. PCT/US01/00669, filed on Jan. 30, 2001.
(63) Continuation-in-part of application No. PCT/US01/00665, filed on Jan. 30, 2001.
(63) Continuation-in-part of application No. PCT/US01/00668, filed on Jan. 30, 2001.
(63) Continuation-in-part of application No. PCT/US01/00663, filed on Jan. 30, 2001.
(63) Continuation-in-part of application No. PCT/US01/00662, filed on Jan. 30, 2001.
(63) Continuation-in-part of application No. PCT/US01/00661, filed on Jan. 30, 2001.
(63) Continuation-in-part of application No. PCT/US01/00670, filed on Jan. 30, 2001.
(60) Provisional application No. 60/207,456, filed on May 26, 2000.
(60) Provisional application No. 60/234,687, filed on Sep. 21, 2000.
(60) Provisional application No. 60/236,359, filed on Sep. 27, 2000.
(60) Provisional application No. 60/266,860, filed on Feb. 5, 2001.

(30) Foreign Application Priority Data
Oct. 4, 2000 (GB) 0024263.6

(51) Int. Cl. C12Q 1/68; G01N 33/53; G01N 33/537; C07H 21/04; C12N 9/00; C12P 21/02; C12N 5/06

(52) U.S. Cl. 435/183; 435/6; 435/7.92; 435/69.1; 435/325; 536/23.2

(57) ABSTRACT

Presented are a novel myosin-like protein particularly expressed in human heart and muscle, isolated nucleic acids encoding the myosin-like protein, compounds and compositions derivable directly or indirectly therefrom, and diagnostic and therapeutic methods for using the same.

### CROSS REFERENCE TO RELATED APPLICATIONS

[0001] This application claims priority under 35 U.S.C. §119(e) to provisional applications for U.S. Patent No. 60/207,456, filed May 26, 2000, No. 60/234,687, filed Sep. 21, 2000, No. 60/236,359, filed Sep. 27, 2000, and No. 60/266,860, filed Feb. 5, 2001, claims priority under 35 U.S.C. § 365(c) to international application nos. PCT/US01/00666, PCT/US01/00667, PCT/US01/00664, PCT/US01/00669, PCT/US01/00665, PCT/US01/00668, PCT/US01/00663, PCT/US01/00662, PCT/US01/00661, PCT/US01/00670, all filed Jan. 30, 2001, and claims priority under 35 U.S.C. § 119(a) to GB 0024263.6, filed Oct. 4, 2000, the disclosures of which are incorporated herein by reference in their entireties.

[0002] The present application includes a Sequence Listing filed herewith on a single (CD-R) compact disc, provided in duplicate. The Sequence Listing is presented in a single file named sequence.txt, last modified May 24, 2001 02:36 p, and having 2,283,433 bytes, the disclosure of which is incorporated herein by reference in its entirety.

### FIELD OF THE INVENTION

[0003] The present invention relates to a novel myosin-like protein particularly expressed in human heart and muscle, isolated nucleic acids encoding the myosin-like protein, compounds and compositions derivable directly or indirectly therefrom, and diagnostic and therapeutic methods for using the same.

### BACKGROUND OF THE INVENTION

[0004] Myosins are ubiquitous proteins that act as intracellular engines, typically motoring along tracks of actin filaments within the cell to drive a variety of cellular processes including muscular contraction, cytokinesis, membrane trafficking and signal transduction. Baker et al., Curr. Opin. Cell Biol. 10: 80-86 (1998). Given the range of intracellular passengers and itineraries, some form of the myosin protein is found in virtually all eukaryotic cells.

[0005] The myosin gene superfamily has at least seventeen members, or classes, encoded by multiple genes.

[0006] Mammalian cells have the largest number of myosin genes, with the 28 identified myosin genes belonging to nine classes. Sellers, Biochim. Biophys. Acta 1496: 3-22 (2000). The genome of the yeast, Saccharomyces cerevisiae, contains just 5 myosin genes. Brown, Curr. Opin. Cell Biol. 9: 44-48 (1997). Between these extremes, the nematode Caenorhabditis elegans has 14 identified myosin genes. Baker et al., J. Mol. Biol. 172: 523-535 (1997). Myosins are also found in plant cells, with myosin genes in classes VIII, XI and XIII expressed exclusively in plants.

[0007] The structure of myosin always includes one or two heavy chains and several light chains.

[0008] The heavy chain is composed of three structurally and functionally different domains. The head domain, which is highly conserved across the myosin family, functions to generate force, and contains actin-binding and ATP-binding sites; the ATPase activity of the head domain is activated by actin binding. The neck region, which mediates association with the light chains, regulates the adjacent head domain. The tail domain regulates the specific activity of each myosin.

[0009] The light chains of myosin I and myosin V are calmodulin, which is a calcium-binding regulatory subunit in certain enzymes. Myosin II is also regulated by calcium-binding light chains, but not calmodulin.

[0010] Together, the disparate myosin heavy and light chains permit myosins to serve disparate cellular roles.

[0011] For example, in brush border microvilli, myosin I, one of the two most abundant forms of myosin, links the microfilament bundles to the plasma membrane.

[0012] Myosin II, the other of the two most abundant myosin classes, forms dimers in muscle cells that associate to form thick filaments, which are part of the contractile apparatus.

[0013] In addition to its well characterized role in contraction and force production in skeletal, cardiac, and smooth muscles, myosin II is required for cytokinesis, cell motility, cell polarity/chemotaxis, maintaining cell architecture and development in nonmuscle cells. Sellers, Biochim. Biophys. Acta 1496:3-22 (2000).

[0014] Thus, contractile bundles, which comprise both actin and myosin II filaments, are found in numerous cell types. In epithelial cells, these bundles are called the circumferential belt and can function structurally (e.g., as an internal brace helping to control cell shape), or for motility (e.g., in wound healing, contraction seals the gap in a sheet of cells).

[0015] Myosin II is an integral component to the cytoskeletal substructure, acting to stiffen cortical membranes. In cytokinesis, myosin II plays an essential role performing the motor function for the contractile ring which constricts to form the cleavage furrow.

[0016] Myosin IXs, identified in rat, human and C. elegans, are expressed in a wide variety of tissues and cell types and are believed to be involved in intracellular signaling pathways. Myosin IX acts as a negative regulator of Rho (a G-protein), suggesting that it may control the Rho signaling pathways involved in cytoskeleton reorganization and other cellular processes. Bahler et al., Biochim. Biophys. Acta 1496:52-59 (2000). However the precise cellular functions of the myosin IXs and their exact roles in the Rho signaling pathways have still to be determined.

[0017] Membrane-bound myosins of various classes, particularly myosin I and myosin V, have been implicated in movement of vesicles within the cell. Due to its co-localization with Golgi membrane, myosin I is thought to move membrane vesicles between membrane compartments in the cytoplasm. Myosin I also serves as a membrane-microfilament linkage in microvilli.

[0018] In yet other examples of myosin function, protein secretion in yeast is disrupted by mutation in the myosin V gene, suggesting an important role for myosin V. In vertebrate brain tissue, myosin V is concentrated in the Golgi stacks and at the tips of membrane processes extending from neuronal cells. Espreafico et al., J. Cell Biol. 119: 1541 (1992). This type of membrane association would be consistent with the effects of myosin V mutations in mice, which adversely affect synaptic transmission, resulting in seizures and eventually death. In cell migration, different myosins localize to different regions of the cell. Myosin I localizes to the leading edge of a crawling amoeba, possibly participating in the translocation phase, whereas myosin II is more concentrated at the tail, where it is involved in retraction of the cell body.

[0019] Given their ubiquity, and the wide variety of tasks driven by myosins, it is not surprising that myosin defects have been implicated in a wide variety of diseases.

[0020] For example, as noted above, myosin V mutations in mice adversely affect synaptic transmission, resulting in seizures and eventually death.

[0021] Myosin and myosin-like genes have also been implicated in a number of human diseases.

[0022] For example, myosin plays a role in hypertrophic cardiomyopathy. An autosomally dominant form of the disease is frequently caused by a missense point mutation in exon 13 of the cardiac myosin heavy chain gene on chromosome 14. Less often, an abnormal cardiac myosin heavy chain hybrid gene is present.

[0023] As another example, mutation in the gene encoding myosin VIIA is responsible for some forms of Usher syndrome. Weil et al., Nature 374:60-61 (1995). Usher Syndrome is characterized by hearing impairment associated with retinitis pigmentosa.

[0024] Three classes of myosins, VI, VII and XV have been associated with genetic deafness disorders in mammals. Hasson, Am. J. Hum. Genet. 61:801-5 (1997); Redowicz, J. Muscle Res. Cell Mot. 20:241-248 (1999). Mutations in these myosins result in abnormalities in the stereocilia in the sensory cells of the inner ear of mice.

[0025] Other myosin-like genes may also be needed for normal stereociliary function in the inner ear, and mutations in these additional myosin-like genes may thus underlie or contribute to various forms of congenital deafness. For example, nonsyndromic hereditary deafness (DFNA17), mapped to chromosome 22q12.2-q13.3 in 1997, has now been associated with mutation in MYH9, a nonmuscle-myosin heavy-chain gene, located within the linked region. Lalwani et al., Am. J. Hum. Genet. 67:1121-8 (2000).

[0026] Despite the long-standing interest in myosins and sequence similarity among classes and across species, not all myosin and myosin-like genes have yet been identified, even in species that are genetically well characterized.

[0027] For example, a novel myosin-like gene (MysPDZ) has recently been cloned from mouse bone marrow stromal cells. The protein encoded by this newly identified gene contains a PDZ domain but no actin-binding domain. Furusawa et al., Biochem. Biophys. Res. Comm. 270: 67-75 (2000). PDZ domains are implicated in modular protein-protein interactions, also binding to specific C-terminal sequences of membrane proteins. Gee et al., Biochem. 39: 14638-46 (2000).

[0028] MysPDZ appears to localize in the cytoskeleton. Furusawa et al. show significant similarity between MysPDZ and a genomic clone from human chromosome 17; a human orthologue has been identified which contains an ATP/GTP-binding site. Nagase et al., DNA Res. 3: 321-329 (1996). Another PDZ-domain containing protein in humans has been shown to associate with actin filaments, possibly through binding to alpha-actinin. Bauer et al., Blood 96: 4236-45 (2000).

[0029] And in humans, genes for other new myosin-like proteins have recently been cloned. See, e.g., WO 00/26372, and U.S. Pat. No. 6,001,593, the disclosures of which is incorporated herein by reference in its entirety.

[0030] Given the importance of myosins in normal cellular processes and in disease, there is a need in the art for access to as yet undiscovered myosin and myosin-like genes.

[0031] Furthermore, diseases of the heart and vascular system are a significant cause of human morbidity and mortality. Increasingly, genetic factors are being found that contribute to predisposition, onset, and/or aggressiveness of most, if not all, of these diseases. There is a need for methods and apparatus that permit prediction, diagnosis and prognosis of diseases of the human heart.

### SUMMARY OF THE INVENTION

[0032] These and other needs in the art are satisfied by the present invention, which provides compounds, compositions and methods based upon the identification and cloning of a novel human myosin-like protein, hGDMLP-1, which is expressed at high levels in human heart and also in skeletal muscle.

[0033] In a first aspect, the invention provides an isolated nucleic acid comprising: (i) the nucleotide sequence of SEQ ID NO:1, the full length cDNA sequence, (ii) the nucleotide sequence of SEQ ID NO:2, which presents the hGDMLP-1 cDNA open reading frame, (iii) a nucleotide sequence that is a degenerate variant of the nucleotide sequence of SEQ ID NO:2, (iv) a nucleotide sequence that encodes a polypeptide with the amino acid sequence of SEQ ID NO:3, which is the full length amino acid sequence of hGDMLP-1, (v) a nucleotide sequence that encodes a polypeptide with the amino acid sequence of SEQ ID NO:3 with conservative amino acid substitutions; (vi) a nucleotide sequence that encodes a polypeptide with the amino acid sequence of SEQ ID NO:3 with moderately conservative amino acid substitutions, or (vii) a nucleotide sequence that is the complement of the nucleotide sequence of any one of (i)-(vi).

[0034] As would be understood, the isolated nucleic acid that encodes hGDMLP-1 can be either genomic or transcript-derived.

[0035] The invention also provides an isolated nucleic acid comprising a nucleotide sequence that hybridizes under high stringency conditions to a probe, the sequence of which probe (i) consists of SEQ ID NO:2, (ii) encodes a polypeptide having the sequence of SEQ ID NO:3, (iii) encodes a polypeptide having the sequence of SEQ ID NO:3 with conservative amino acid substitutions, or (iv) is the complement of (i)-(iii), wherein the isolated nucleic acid is nonidentical in sequence to GenBank accession no. AA993492 and is less than 50 kb in length.

[0036] As further described below, GenBank accession no. AA993492 is an anonymous EST identical in sequence to portions of exons 15 and 16 of hGDMLP-1. By “nonidentity” is intended that the nucleic acid of the present invention have fewer, additional, or at least one nucleotide different from that of AA993492.

[0037] The invention further provides an isolated nucleic acid comprising a nucleotide sequence that hybridizes under moderate stringency conditions to a probe, the sequence of which probe (i) consists of SEQ ID NO:2, (ii) encodes a polypeptide having the sequence of SEQ ID NO:3, (iii) encodes a polypeptide having the sequence of SEQ ID NO:3 with conservative amino acid substitutions; or (iv) is the complement of (i)-(iii), wherein the isolated nucleic acid is nonidentical in sequence to GenBank accession no. AA993492 and is less than 50 kb in length.

[0038] In a related aspect, the invention provides an isolated nucleic acid comprising a nucleotide sequence that encodes at least 8 contiguous amino acids of SEQ ID NO:3, wherein the isolated nucleic acid is nonidentical in sequence to GenBank accession no. AA993492 and is less than 50 kb in length.

[0039] The invention also provides an isolated polynucleotide comprising a fragment of at least 17 nucleotides of the isolated nucleic acid of any one of claims 1-3, wherein the isolated nucleic acid is nonidentical in sequence to GenBank accession no. AA993492 and is less than 50 kb in length.

[0040] In useful embodiments of the isolated nucleic acids of the present invention, the isolated nucleic acid encodes a polypeptide having ATPase activity. In further useful embodiments, the isolated nucleic acids encode a polypeptide capable of binding calmodulin. Typically, the nucleic acids of the present invention are expressed in both skeletal muscle and heart muscle.

[0041] In another aspect, the invention provides the isolated nucleic acid molecule of the present invention operably linked to one or more expression control elements.

[0042] The invention further provides a replicable vector comprising an isolated nucleic acid molecule of the present invention.

[0043] In a further aspect, the invention provides a host cell transformed to contain the nucleic acid molecule of the present invention, or the progeny thereof.

[0044] In a related aspect, the invention provides a method for producing a polypeptide, the method comprising: culturing the transformed host cell of the present invention under conditions in which the protein encoded by the nucleic acid molecule is expressed.

[0045] Accordingly, the invention provides hGDMLP-1 polypeptides. In some embodiments, the polypeptide of the present invention is produced by the method described above.

[0046] In other embodiments, the invention provides an isolated polypeptide selected from the group consisting of: (a) an isolated polypeptide comprising the amino acid sequence of SEQ ID NO:3; (b) an isolated polypeptide comprising a fragment of at least 8 amino acids of SEQ ID NO: 3; (c) an isolated polypeptide according to (a) or (b) in which at least 95% of deviations from the sequence of (a) or (b) are conservative substitutions; and (d) an isolated polypeptide having at least 65% amino acid sequence identity to the isolated polypeptide of (a) or (b).

[0047] In another aspect, the invention provides an isolated antibody or antigen-binding fragment or derivative thereof, the binding of which can be competitively inhibited by a polypeptide of the present invention.

[0048] The invention also provides a method of identifying binding partners for a polypeptide according to the present invention, the method comprising: contacting the polypeptide to a potential binding partner; and determining if the potential binding partner binds to said polypeptide.

[0049] In another aspect, the invention provides a method of modulating the expression of a nucleic acid of the present invention, the method comprising: administering an effective amount of an agent which modulates the expression of the nucleic acid. The invention further provides a method of modulating at least one activity of a polypeptide according to the present invention, the method comprising: administering an effective amount of an agent which modulates at least one activity of a polypeptide according to the present invention.

[0050] In another aspect, the invention provides a transgenic non-human animal or transgenic plant modified to contain a nucleic acid molecule of the present invention and a transgenic non-human animal unable to express the orthologue of the polypeptide of the present invnetion.

[0051] In another aspect, the invention provides a method of diagnosing a disease caused by mutation in human hGDMLP-1, comprising: detecting the mutation in a sample of nucleic acids that derives from a subject suspected to have said disease.

[0052] In a further aspect, the invention provides a method of diagnosing or monitoring a disease caused by altered expression of human hGDMLP-1, comprising: determining the level of expression of human hGDMLP-1 in a sample of nucleic acids or proteins that derives from a subject suspected to have said disease, alterations from a normal level of expression providing diagnostic and/or monitoring information.

[0053] The invention further provides pharmaceutical compositions, including compositions separately comprising the nucleic acids, proteins, antibodies, antagonists and agonists of the present invention and a pharmaceutically acceptable excipient.

[0054] In a related aspect, the invention provides a method for treating or preventing a disorder associated with decreased expression or activity of human hGDMLP-1, the method comprising administering to a subject in need of such treatment an effective amount of the pharmaceutical composition comprising the nucleic acid, protein, or hGDMLP-1 agonist of the present invention.

[0055] Analogously, the invention further provides a method for treating or preventing a disorder associated with increased expression or activity of human hGDMLP-1, the method comprising administering to a subject in need of such treatment an effective amount of the pharmaceutical composition comprising an antibody or antagonist of the present invention.

[0056] The invention provides diagnostic compositions comprising, e.g., the nucleic acid, antibody, or polypeptide of the present invention, the nucleic acid being detectably labeled. In some embodiments, the diagnostic composition is suitable for in vivo administration.

[0057] In another embodiment, the invention provides the isolated nucleic acid molecule of the present invention attached to a substrate, and a microarray, at least one probe of which microarray is a nucleic acid according to the present invention.

[0058] The invention further provides a method for detecting a target nucleic acid in a sample, the target being a nucleic acid of the present invention, the method comprising: a) hybridizing the sample with a probe comprising at least 30 contiguous nucleotides of a sequence complementary to the target nucleic acid in the sample under hybridization conditions sufficient to permit detectable binding of said probe to said target, and b) detecting the presence or absence, and optionally the amount, of said binding.

[0059] The invention also provides a fusion protein, the fusion protein comprising a polypeptide of the present invention fused to a heterologous amino acid sequence. In certain particularly useful embodiments, the heterologous amino acid sequence is a detectable moiety, such as a fluorescent moiety. In other embodiments, the heterologous amino acid sequence is an Ig Fc region.

[0060] In yet another aspect, the invention provides a method of screening for agents that modulate the expression of human hGDMLP-1, the method comprising: contacting a cell or tissue sample believed to express human hGDMLP-1 with a chemical or biological agent, and then comparing the amount of human hGDMLP-1 expression with that of a control.

### BRIEF DESCRIPTION OF THE DRAWINGS

[0061] The above and other objects and advantages of the present invention will be apparent upon consideration of the following detailed description taken in conjunction with the accompanying drawings, in which like characters refer to like parts throughout, and in which:

[0062] FIG. 1 is a screen shot of a graphical display that facilitates identification of exons in genomic sequence the expression of which meets user criteria, particularly identifying heart-specific expression of one exon of the gene of the present invention;

[0063] FIGS. 2A-2L collectively show the sequence of the cDNA encoding the human genome-derived myosin-like protein (hGDMLP-1) of the present invention, with its predicted amino acid sequence;

[0064] FIGS. 3A-3C collectively show an alignment of the hGDMLP-1 coding sequence of the present invention with the two closest known orthologues;

[0065] FIG. 4 shows an alignment of the amino acid sequence of hGDMLP-1 of the present invention and human myocilin;

[0066] FIG. 5 schematizes the genomic organization of the hGDMLP-1 gene, showing the relative location and size of the 44 exons of the protein and their relationship to the genomic clones (BACs) and cDNA open reading frame; and

[0067] FIG. 6 is a northern blot probed with a labeled fragment of hGDMLP-1, according to the present invention, showing muscle- and heart-specific expression of an 8 kb transcript corresponding to hGDMLP-1.

### DETAILED DESCRIPTION OF THE INVENTION

[0068] The present invention is based on the discovery of a new human myosin heavy chain-like protein, hGDMLP-1, the polynucleotides encoding hGDMLP-1, and the use of these compositions, inter alia, for the diagnosis, prevention, or treatment of disorders.

[0069] Definitions

[0070] Unless defined otherwise, all technical and scientific terms used herein have the meaning commonly understood by one of ordinary skill in the art to which this invention belongs. As used herein and in the appended claims, the singular forms “a”, “an”, and “the” include plural reference unless the context clearly dictates otherwise.

[0071] As used herein, “nucleic acid” (synonymously, “polynucleotide”) includes polynucleotides having natural nucleotides in native 5′-3′ phosphodiester linkage—e.g., DNA or RNA—as well as polynucleotides that have nonnatural nucleotide analogues, nonnative internucleoside bonds, or both, so long as the nonnatural polynucleotide is capable of sequence-discriminating basepairing under experimentally desired conditions. Unless otherwise specified, the term “nucleic acid” includes any topological conformation; the term thus explicitly comprehends single-stranded, double-stranded, partially duplexed, triplexed, hairpinned, circular, and padlocked conformations.

[0072] As used herein, an “isolated nucleic acid” is a nucleic acid molecule that exists in a physical form that is nonidentical to any nucleic acid molecule of identical sequence as found in nature; “isolated” does not require, although it does not prohibit, that the nucleic acid so described has itself been physically removed from its native environment.

[0073] For example, a nucleic acid can be said to be “isolated” when it includes nucleotides and/or internucleoside bonds not found in nature. When instead composed of natural nucleosides in phosphodiester linkage, a nucleic acid can be said to be “isolated” when it exists at a purity not found in nature, where purity can be adjudged with respect to the presence of nucleic acids of other sequence, with respect to the presence of proteins, with respect to the presence of lipids, or with respect the presence of any other component of a biological cell, or when the nucleic acid lacks sequence that flanks an otherwise identical sequence in an organism's genome, or when the nucleic acid possesses sequence not identically present in nature.

[0074] As so defined, “isolated nucleic acid” includes nucleic acids integrated into a host cell chromosome at a heterologous site, recombinant fusions of a native fragment to a heterologous sequence, recombinant vectors present as episomes or as integrated into a host cell chromosome.

[0075] As used herein, an isolated nucleic acid “encodes” a reference polypeptide when at least a portion of the nucleic acid, or its complement, can be directly translated to provide the amino acid sequence of the reference polypeptide, or when the isolated nucleic acid can be used, alone or as part of an expression vector, to express the reference polypeptide in vitro, in a prokaryotic host cell, or in a eukaryotic host cell.

[0076] As used herein, the term “exon” refers to a nucleic acid sequence found in genomic DNA that is bioinformatically predicted and/or experimentally confirmed to contribute contiguous sequence to a mature mRNA transcript.

[0077] As used herein, the phrase “open reading frame” and the equivalent acronym “ORF” refer to that portion of a transcript-derived nucleic acid that can be translated in its entirety into a sequence of contiguous amino acids. As so defined, an ORF has length, measured in nucleotides, exactly divisible by 3. As so defined, an ORF need not encode the entirety of a natural protein.

[0078] As used herein, the phrase “ORF-encoded peptide” refers to the predicted or actual translation of an ORF.

[0079] As used herein, the phrase “degenerate variant” of a reference nucleic acid sequence intends all nucleic acid sequences that can be directly translated, using the standard genetic code, to provide an amino acid sequence identical to that translated from the reference nucleic acid sequence.

[0080] As used herein, the term “microarray” and the equivalent phrase “nucleic acid microarray” refer to a substrate-bound collection of plural nucleic acids, hybridization to each of the plurality of bound nucleic acids being separately detectable. The substrate can be solid or porous, planar or non-planar, unitary or distributed.

[0081] As so defined, the term “microarray” and phrase “nucleic acid microarray” include all the devices so called in Schena (ed.), DNA Microarrays: A Practical Approach (Practical Approach Series), Oxford University Press (1999) (ISBN: 0199637768); Nature Genet. 21(1)(suppl):1-60 (1999); and Schena (ed.), Microarray Biochip: Tools and Technology, Eaton Publishing Company/BioTechniques Books Division (2000) (ISBN: 1881299376), the disclosures of which are incorporated herein by reference in their entireties.

[0082] As so defined, the term “microarray” and phrase “nucleic acid microarray” include substrate-bound collections of plural nucleic acids in which the plurality of nucleic acids are distributably disposed on a plurality of beads, rather than on a unitary planar substrate, as is described, inter alia, in Brenner et al., Proc. Natl. Acad. Sci. USA 97(4):166501670 (2000), the disclosure of which is incorporated herein by reference in its entirety; in such case, the term “microarray” and phrase “nucleic acid microarray” refer to the plurality of beads in aggregate.

[0083] As used herein with respect to solution phase hybridization, the term “probe”, or equivalently, “nucleic acid probe” or “hybridization probe”, refers to an isolated nucleic acid of known sequence that is, or is intended to be, detectably labeled. As used herein with respect to a nucleic acid microarray, the term “probe” (or equivalently “nucleic acid probe” or “hybridization probe”) refers to the isolated nucleic acid that is, or is intended to be, bound to the substrate. In either such context, the term “target” refers to nucleic acid intended to be bound to probe by sequence complementarity.

[0084] As used herein, the expression “probe comprising SEQ ID NO:X”, and variants thereof, intends a nucleic acid probe, at least a portion of which probe has either (i) the sequence directly as given in the referenced SEQ ID NO:X, or (ii) a sequence complementary to the sequence as given in the referenced SEQ ID NO:X, the choice as between sequence directly as given and complement thereof dictated by the requirement that the probe be complementary to the desired target.

[0085] As used herein, the phrases “expression of a probe” and “expression of an isolated nucleic acid” and their linguistic equivalents intend that the probe (or, respectively, isolated nucleic acid), or a probe (or, respectively, isolated nucleic acid) complementary in sequence thereto, can hybridize detectably under high stringency conditions to a sample of nucleic acids that derive from mRNA transcripts from a given source. For example, and by way of illustration only, expression of a probe in “liver” means that the probe can hybridize detectably under high stringency conditions to a sample of nucleic acids that derive from mRNA obtained from liver.

[0086] As used herein, “a single exon probe” comprises at least part of an exon (“reference exon”) and can hybridize detectably under high stringency conditions to transcript-derived nucleic acids that include the reference exon. The single exon probe will not, however, hybridize detectably under high stringency conditions to nucleic acids that lack the reference exon but include one or more exons that are found adjacent to the reference exon in the genome.

[0087] For purposes herein, “high stringency conditions” are defined for solution phase hybridization as aqueous hybridization (i.e., free of formamide) in 6×SSC (where 20×SSC contains 3.0 M NaCl and 0.3 M sodium citrate), 1% SDS at 65° C. for at least 8 hours, followed by one or more washes in 0.2×SSC, 0.1% SDS at 65° C. “Moderate stringency conditions” are defined for solution phase hybridization as aqueous hybridization (i.e., free of formamide) in 6×SSC, 1% SDS at 65° C. for at least 8 hours, followed by one or more washes in 2×SSC, 0.1% SDS at room temperature.

[0088] For microarray-based hybridization, standard “high stringency conditions” are defined as hybridization in 50% formamide, 5×SSC, 0.2 μg/μl poly(dA), 0.2 μg/μl human cot1 DNA, and 0.5% SDS, in a humid oven at 42° C. overnight, followed by successive washes of the microarray in 1×SSC, 0.2% SDS at 55° C. for 5 minutes, and then0.1×SSC, 0.2% SDS, at 55° C. for 20 minutes. For microarray-based hybridization, “moderate stringency conditions”, suitable for cross-hybridization to mRNA encoding structurally- and functionally-related proteins, are defined to be the same as those for high stringency conditions but with reduction in temperature for hybridization and washing to room temperature (approximately 25° C.).

[0089] As used herein, the terms “protein”, “polypeptide”, and “peptide” are used interchangeably to refer to a naturally-occurring or synthetic polymer of amino acid monomers (residues), irrespective of length, where amino acid monomer here includes naturally-occurring amino acids, naturally-occurring amino acid structural variants, and synthetic non-naturally occurring analogs that are capable of participating in peptide bonds. The terms “protein”, “polypeptide”, and “peptide” explicitly permits of post-translational and post-synthetic modifications, such as glycosylation.

[0090] The term “oligopeptide” herein denotes a protein, polypeptide, or peptide having 25 or fewer monomeric subunits.

[0091] The phrases “isolated protein”, “isolated polypeptide”, “isolated peptide” and “isolated oligopeptidel” refer to a protein (or respectively to a polypeptide, peptide, or oligopeptide) that is nonidentical to any protein molecule of identical amino acid sequence as found in nature; “isolated” does not require, although it does not prohibit, that the protein so described has itself been physically removed from its native environment.

[0092] For example, a protein can be said to be “isolated” when it includes amino acid analogues or derivatives not found in nature, or includes linkages other than standard peptide bonds.

[0093] When instead composed entirely of natural amino acids linked by peptide bonds, a protein can be said to be “isolated” when it exists at a purity not found in nature—where purity can be adjudged with respect to the presence of proteins of other sequence, with respect to the presence of non-protein compounds, such as nucleic acids, lipids, or other components of a biological cell, or when it exists in a composition not found in nature, such as in a host cell that does not naturally express that protein.

[0094] A “purified protein” (equally, a purified polypeptide, peptide, or oligopeptide) is an isolated protein, as above described, present at a concentration of at least 95%, as measured on a mass basis with respect to total protein in a composition. A “substantially purified protein” (equally, a substantially purified polypeptide, peptide, or oligopeptide) is an isolated protein, as above described, present at a concentration of at least 70%, as measured on a mass basis with respect to total protein in a composition.

[0095] As used herein, the phrase “protein isoforms” refers to a plurality of proteins having nonidentical primary amino acid sequence but that share amino acid sequence encoded by at least one common exon.

[0096] As used herein, the phrase “alternative splicing” and its linguistic equivalents includes all types of RNA processing that lead to expression of plural protein isoforms from a single gene; accordingly, the phrase “splice variant(s)” and its linguistic equivalents embraces mRNAs transcribed from a given gene that, however processed, collectively encode plural protein isoforms. For example, and by way of illustration only, splice variants can include exon insertions, exon extensions, exon truncations, exon deletions, alternatives in the 5′ untranslated region (“5′ UT”) and alternatives in the 3′ untranslated region (“3′ UT”). Such 31 alternatives include, for example, differences in the site of RNA transcript cleavage and site of poly(A) addition. See, e.g., Gautheret et al., Genome Res. 8:524-530 (1998).

[0097] As used herein, “orthologues” are separate occurrences of the same gene in multiple species. The separate occurrences have similar, albeit nonidentical, amino acid sequences, the degree of sequence similarity depending, in part, upon the evolutionary distance of the species from a common ancestor having the same gene.

[0098] As used herein, the term “paralogues” indicates separate occurrences of a gene in one species. The separate occurrences have similar, albeit nonidentical, amino acid sequences, the degree of sequence similarity depending, in part, upon the evolutionary distance from the gene duplication event giving rise to the separate occurrences.

[0099] As used herein, the term “homologues” is generic to “orthologues” and “paralogues”.

[0100] As used herein, the term “antibody” refers to a polypeptide, at least a portion of which is encoded by at least one immunoglobulin gene, or fragment thereof, and that can bind specifically to a desired target molecule. The term includes naturally-occurring forms, as well as fragments and derivatives.

[0101] Fragments within the scope of the term “antibody” include those produced by digestion with various proteases, those produced by chemical cleavage and/or chemical dissociation, and those produced recombinantly, so long as the fragment remains capable of specific binding to a target molecule. Among such fragments are Fab, Fab′, Fv, F(ab)′₂ and single chain Fv (scFv) fragments.

[0102] Derivatives within the scope of the term “antibody” include antibodies (or fragments thereof) that have been modified in sequence, but remain capable of specific binding to a target molecule, including: interspecies chimeric and humanized antibodies; antibody fusions; heteromeric antibody complexes and antibody fusions, such as diabodies (bispecific antibodies), single-chain diabodies, and intrabodies (see, e.g., Marasco (ed.), Intracellular Antibodies: Research and Disease Applications, Springer-Verlag New York, Inc. (1998) (ISBN: 3540641513), the disclosure of which is incorporated herein by reference in its entirety).

[0103] As used herein, “antigen” refers to a ligand that can be bound by an antibody; an antigen need not itself be immunogenic. The portions of the antigen that make contact with the antibody are denominated “epitopes”.

[0104] “Specific binding” refers to the ability of two molecular species concurrently present in a heterogeneous (inhomogeneous) sample to bind to one another in preference to binding to other molecular species in the sample. Typically, a specific binding interaction will discriminate over adventitious binding interactions in the reaction by at least two-fold, more typically by at least 10-fold, often at least 100-fold; when used to detect analyte, specific binding is sufficiently discriminatory when determinative of the presence of the analyte in a heterogeneous (inhomogeneous) sample. Typically, the affinity or avidity of a specific binding reaction is least about 10⁻⁷ M, with specific binding reactions of greater specificity typically having affinity or avidity of at least 10⁻⁸ M to at least about 10⁻⁹ M.

[0105] As used herein, “molecular binding partners”—and equivalently, “specific binding partners”—refer to pairs of molecules, typically pairs of biomolecules, that exhibit specific binding. Nonlimiting examples are receptor and ligand, antibody and antigen, and biotin to any of avidin, streptavidin, neutrAvidin and captAvidin.

[0106] Unless made otherwise clear by context, “hGDMLP-1” as used herein includes both human hGDMLP-1 and orthologues from other species. Particularly useful orthologues are those from other primate species, such as chimpanzee, rhesus macaque monkey, baboon, orangutan, and gorilla; from rodents, such as rats, mice, guinea pigs; from lagomorphs, such as rabbits, and from domestic livestock, such as cow, pig, sheep, horse, goat.

[0107] The term “agonist”, as used herein, refers to a molecule which, when bound to hGDMLP-1, increases or prolongs the duration of the effect of hGDMLP-1, or stimulates the function of hGDMLP-1. Conversely, an “antagonist”, as used herein, refers to a molecule which, when bound to hGDMLP-1, decreases the amount or the duration of the effect of the biological or immunological activity of hGDMLP-1, or reduces the function of hGDMLP-1.

[0108] The term “antisense”, as used herein, refers to a nucleic acid molecule sufficiently complementary in sequence and sufficiently long in complementary sequence as to hybridize under intracellular conditions to (i) a target mRNA transcript or (ii) the genomic DNA strand complementary to that transcribed to produce the target mRNA transcript.

[0109] A “biologically active” hGDMLP-1 protein, derivative, or fragment thereof has at least one measurable biological, biochemical, structural, or regulatory activity of hGDMLP-1. An “immunologically active” hGDMLP-1 protein, derivative, or fragment thereof is able to induce a specific cellular or humoral immune response to the immunizing protein, derivative, or fragment; although preferred, it is not required that the response be cross-reactive with native hGDMLP-1.

[0110] An agent is said to “modulate” the activity of hGDMLP-1 protein when it measurably changes at least one biological or immunological activity of hGDMLP-1; such change can, but need not, be effected by change in the amount of hGDMLP-1 present in a cell.

[0111] A “consensus sequence”, as used herein, is a nucleic acid sequence that has been formulated by any or all of (i) resequencing to resolve uncalled bases, (ii) extension (e.g. by RACE or anchored PCR), or (iii) assembly from overlapping sequences of more than one clone.

[0112] The term “portion”, as used with respect to nucleic acids, proteins, and antibodies, is synonymous with “fragment”.

[0113] A “variant” of hGDMLP-1, as used herein, refers to a protein having a sequence that is altered from hGDMLP-1 by one or more amino acids. The term includes proteins having conservative or moderately conservative replacements, amino acid deletions, amino acid insertions, or combinations thereof. Guidance in determining which amino acid residues can be substituted, inserted, or deleted without abolishing biological or immunological activity is set forth herein below.

[0114] Nucleic Acid Molecules

[0115] In a first aspect, the invention provides isolated nucleic acids that encode hGDMLP-1, variants having at least 65% sequence identity thereto, degenerate variants thereof, variants that encode hGDMLP-1 proteins having conservative or moderately conservative substitutions, cross-hybridizing nucleic acids, and fragments thereof.

[0116] FIG. 2 presents the nucleotide sequence of the hGDMLP-1 cDNA clone, with predicted amino acid translation; the sequences are further presented in the Sequence Listing, incorporated herein by reference in its entirety, as follows:

| | |
|---|---|
| SEQ ID NO: 1 | (nt; full length cDNA) |
| SEQ ID NO: 2 | (nt; cDNA ORF) |
| SEQ ID NO: 3 | (aa; full length protein) |
| SEQ ID NO: 4 | (nt; cDNA nt 1-2953) |
| SEQ ID NO: 5 | (nt; cDNA nt 3175-end) |
| SEQ ID NOs: 6-2,942 | (nt; 17-mers scanning SEQ ID NO: 4) |
| SEQ ID NOs: 2,943-5,871 | (nt; 25-mers scanning SEQ ID NO: 4) |
| SEQ ID NOs: 5,872-10,771 | (nt; 17-mers scanning SEQ ID NO: 5) |
| SEQ ID NOs: 10,772-15,663 | (nt; 25-mers scanning SEQ ID NO: 5) |
| SEQ ID NOs: 15,664-15,707 | (nt; exons) |
| SEQ ID NOs: 15,708-15,751 | (nt; amplicons) |
| SEQ ID NO: 15,752 | (nt; putative promoter sequence) |

[0117] Unless otherwise indicated, each nucleotide sequence is set forth herein as a sequence of deoxyribonucleotides. It is intended, however, that the given sequence be interpreted as would be appropriate to the polynucleotide composition: for example, if the isolated nucleic acid is composed of RNA, the given sequence intends ribonucleotides, with uridine substituted for thymidine.

[0118] Unless otherwise indicated, nucleotide sequences of the isolated nucleic acids of the present invention were determined by sequencing a DNA molecule that had resulted, directly or indirectly, from at least one enzymatic polymerization reaction (e.g., reverse transcription and/or polymerase chain reaction) using an automated sequencer (such as the MegaBACE™ 1000, Molecular Dynamics, Sunnyvale, Calif., USA), or by reliance upon such sequence or upon genomic sequence prior-accessioned into a public database. Unless otherwise indicated, all amino acid sequences of the polypeptides of the present invention were predicted by translation from the nucleic acid sequences so determined.

[0119] As a consequence, any nucleic acid sequence presented herein may contain errors introduced by erroneous incorporation of nucleotides during polymerization, by erroneous base calling by the automated sequencer (although such sequencing errors have been minimized for the nucleic acids directly determined herein, unless otherwise indicated, by the sequencing of each of the complementary strands of a duplex DNA), or by similar errors accessioned into the public database.

[0120] Accordingly, the hGDMLP-1 cDNA clone described herein has been deposited in a public repository (American Type Culture Collection, Manassas, Va., USA). The deposit, received at ATCC on May 23, 2001, has been accorded an accession date after viability testing of ______ and accession number of ______. Any errors in sequence reported herein can be determined and corrected by sequencing nucleic acids propagated from the deposited clones using standard techniques.

[0121] Single nucleotide polymorphisms (SNPs) occur frequently in eukaryotic genomes—more than 1.4 million SNPs have already identified in the human genome, International Human Genome Sequencing Consortium, Nature 409:860-921 (2001)—and the sequence determined from one individual of a species may differ from other allelic forms present within the population. Additionally, small deletions and insertions, rather than single nucleotide polymorphisms, are not uncommon in the general population, and often do not alter the function of the protein.

[0122] Accordingly, it is an aspect of the present invention to provide nucleic acids not only identical in sequence to those described with particularity herein, but also to provide isolated nucleic acids at least about 65% identical in sequence to those described with particularity herein, typically at least about 70%, 75%, 80%, 85%, or 90% identical in sequence to those described with particularity herein, usefully at least about 91%, 92%, 93%, 94%, or 95% identical in sequence to those described with particularity herein, usefully at least about 96%, 97%, 98%, or 99% identical in sequence to those described with particularity herein, and, most conservatively, at least about 99.5%, 99.6%, 99.7%, 99.8% and 99.9% identical in sequence to those described with particularity herein. These sequence variants can be naturally occurring or can result from human intervention, as by random or directed mutagenesis.

[0123] For purposes herein, percent identity of two nucleic acid sequences is determined using the procedure of Tatiana et al., “TBlast 2 sequences—a new tool for comparing protein and nucleotide sequences”, FEMS Microbiol Lett. 174:247-250 (1999), which procedure is effectuated by the computer program BLAST 2 SEQUENCES, available online at

[0124] http://www.ncbi.nlm.nih.gov/blast/b12seq/b12.html.

[0125] To assess percent identity of nucleic acids, the BLASTN module of BLAST 2 SEQUENCES is used with default values of (i) reward for a match: 1; (ii) penalty for a mismatch: −2; (iii) open gap 5 and extension gap 2 penalties; (iv) gap X_dropoff 50 expect 10 word size 11 filter, and both sequences are entered in their entireties.

[0126] As is well known, the genetic code is degenerate, with each amino acid except methionine translated from a plurality of codons, thus permitting a plurality of nucleic acids of disparate sequence to encode the identical protein. As is also well known, codon choice for optimal expression varies from species to species. The isolated nucleic acids of the present invention being useful for expression of hGDMLP-1 proteins and protein fragments, it is, therefore, another aspect of the present invention to provide isolated nucleic acids that encode hGDMLP-1 proteins and portions thereof not only identical in sequence to those described with particularity herein, but degenerate variants thereof as well.

[0127] As is also well known, amino acid substitutions occur frequently among natural allelic variants, with conservative substitutions often occasioning only de minimis change in protein function.

[0128] Accordingly, it is an aspect of the present invention to provide nucleic acids not only identical in sequence to those described with particularity herein, but also to provide isolated nucleic acids that encode hGDMLP-1, and portions thereof, having conservative amino acid substitutions, and also to provide isolated nucleic acids that encode hGDMLP-1, and portions thereof, having moderately conservative amino acid substitutions.

[0129] Although there are a variety of metrics for calling conservative amino acid substitutions, based primarily on either observed changes among evolutionarily related proteins or on predicted chemical similarity, for purposes herein a conservative replacement is any change having a positive value in the PAM250 log-likelihood matrix reproduced herein below (see Gonnet et al., Science 256(5062):1443-5 (1992)):

| | A | R | N | D | C | Q | E | G | H | I | L | K | M | F | P | S | T | W | Y | V |
|---|---|---|---|---|---|---|---|---|---|---|---|---|---|---|---|---|---|---|---|---|
| A | 2 | −1 | 0 | 0 | 0 | 0 | 0 | 0 | −1 | −1 | −1 | 0 | −1 | −2 | 0 | 1 | 1 | −4 | −2 | 0 |
| R | −1 | 5 | 0 | 0 | −2 | 2 | 0 | −1 | 1 | −2 | −2 | 3 | −2 | −3 | −1 | 0 | 0 | −2 | −2 | −2 |
| N | 0 | 0 | 4 | 2 | −2 | 1 | 1 | 0 | 1 | −3 | −3 | 1 | −2 | −3 | −1 | 1 | 0 | −4 | −1 | −2 |
| D | 0 | 0 | 2 | 5 | −3 | 1 | 3 | 0 | 0 | −4 | −4 | 0 | −3 | −4 | −1 | 0 | 0 | −5 | −3 | −3 |
| C | 0 | −2 | −2 | −3 | 12 | −2 | −3 | −2 | −1 | −1 | −2 | −3 | −1 | −1 | −3 | 0 | 0 | −1 | 0 | 0 |
| Q | 0 | 2 | 1 | 1 | −2 | 3 | 2 | −1 | 1 | −2 | −2 | 2 | −1 | −3 | 0 | 0 | 0 | −3 | −2 | −2 |
| E | 0 | 0 | 1 | 3 | −3 | 2 | 4 | −1 | 0 | −3 | −3 | 1 | −2 | −4 | 0 | 0 | 0 | −4 | −3 | −2 |
| G | 0 | −1 | 0 | 0 | −2 | −1 | −1 | 7 | −1 | −4 | −4 | −1 | −4 | −5 | −2 | 0 | −1 | −4 | −4 | −3 |
| H | −1 | 1 | 1 | 0 | −1 | 1 | 0 | −1 | 6 | −2 | −2 | 1 | −1 | 0 | −1 | 0 | 0 | −1 | 2 | −2 |
| I | −1 | −2 | −3 | −4 | −1 | −2 | −3 | −4 | −2 | 4 | 3 | −2 | 2 | 1 | −3 | −2 | −1 | −2 | −1 | 3 |
| L | −1 | −2 | −3 | −4 | −2 | −2 | −3 | −4 | −2 | 3 | 4 | −2 | 3 | 2 | −2 | −2 | −1 | −1 | 0 | 2 |
| K | 0 | 3 | 1 | 0 | −3 | 2 | 1 | −1 | 1 | −2 | −2 | 3 | −1 | −3 | −1 | 0 | 0 | −4 | −2 | −2 |
| M | −1 | −2 | −2 | −3 | −1 | −1 | −2 | −4 | −1 | 2 | 3 | −1 | 4 | 2 | −2 | −1 | −1 | −1 | 0 | 2 |
| F | −2 | −3 | −3 | −4 | −1 | −3 | −4 | −5 | 0 | 1 | 2 | −3 | 2 | 7 | −4 | −3 | −2 | 4 | 5 | 0 |
| P | 0 | −1 | −1 | −1 | −3 | 0 | 0 | −2 | −1 | −3 | −2 | −1 | −2 | −4 | 8 | 0 | 0 | −5 | −3 | −2 |
| S | 1 | 0 | 1 | 0 | 0 | 0 | 0 | 0 | 0 | −2 | −2 | 0 | −1 | −3 | 0 | 2 | 2 | −3 | −2 | −1 |
| T | 1 | 0 | 0 | 0 | 0 | 0 | 0 | −1 | 0 | −1 | −1 | 0 | −1 | −2 | 0 | 2 | 2 | −4 | −2 | 0 |
| W | −4 | −2 | −4 | −5 | −1 | −3 | −4 | −4 | −1 | −2 | −1 | −4 | −1 | 4 | −5 | −3 | −4 | 14 | 4 | −3 |
| Y | −2 | −2 | −1 | −3 | 0 | −2 | −3 | −4 | 2 | −1 | 0 | −2 | 0 | 5 | −3 | −2 | −2 | 4 | 8 | −1 |
| V | 0 | −2 | −2 | −3 | 0 | −2 | −2 | −3 | −2 | 3 | 2 | −2 | 2 | 0 | −2 | −1 | 0 | −3 | −1 | 3 |

[0130] For purposes herein, a “moderately conservative” replacement is any change having a nonnegative value in the PAM250 log-likelihood matrix reproduced herein above.

[0131] As is also well known in the art, relatedness of nucleic acids can also be characterized using a functional test, the ability of the two nucleic acids to base-pair to one another at defined hybridization stringencies.

[0132] It is, therefore, another aspect of the invention to provide isolated nucleic acids not only identical in sequence to those described with particularity herein, but also to provide isolated nucleic acids (“cross-hybridizing nucleic acids”) that hybridize under high stringency conditions (as defined herein) to all or to a portion of various of the isolated hGDMLP-1 nucleic acids of the present invention (“reference nucleic acids”), as well as cross-hybridizing nucleic acids that hybridize under moderate stringency conditions to all or to a portion of various of the isolated hGDMLP-1 nucleic acids of the present invention.

[0133] Such cross-hybridizing nucleic acids are useful, inter alia, as probes for, and to drive expression of, proteins related to the proteins of the present invention as alternative isoforms, homologues, paralogues, and orthologues. Particularly preferred orthologues are those from other primate species, such as chimpanzee, rhesus macaque, baboon, and gorilla, from rodents, such as rats, mice, guinea pigs, and from livestock, such as cow, pig, sheep, horse, goat.

[0134] The hybridizing portion of the reference nucleic acid is typically at least 15 nucleotides in length, often at least 17 nucleotides in length. Often, however, the hybridizing portion of the reference nucleic acid is at least 20 nucleotides in length, 25 nucleotides in length, and even 30 nucleotides, 35 nucleotides, 40 nucleotides, and 50 nucleotides in length. Of course, cross-hybridizing nucleic acids that hybridize to a larger portion of the reference nucleic acid—for example, to a portion of at least 50 nt, at least 100 nt, at least 150 nt, 200 nt, 250 nt, 300 nt, 350 nt, 400 nt, 450 nt, or 500 nt or more—or even to the entire length of the reference nucleic acid, are also useful.

[0135] The hybridizing portion of the cross-hybridizing nucleic acid is at least 75% identical in sequence to at least a portion of the reference nucleic acid. Typically, the hybridizing portion of the cross-hybridizing nucleic acid is at least 80%, often at least 85%, 86%, 87%, 88%, 89% or even at least 90% identical in sequence to at least a portion of the reference nucleic acid. Often, the hybridizing portion of the cross-hybridizing nucleic acid will be at least 91%, 92%, 93%, 94%, 95%, 96%, 97%, 98%, or 99% identical in sequence to at least a portion of the reference nucleic acid sequence. At times, the hybridizing portion of the cross-hybridizing nucleic acid will be at least 99.5% identical in sequence to at least a portion of the reference nucleic acid.

[0136] The invention also provides fragments of various of the isolated nucleic acids of the present invention.

[0137] By “fragments” of a reference nucleic acid is here intended isolated nucleic acids, however obtained, that have a nucleotide sequence identical to a portion of the reference nucleic acid sequence, which portion is at least 17 nucleotides and less than the entirety of the reference nucleic acid. As so defined, “fragments” need not be obtained by physical fragmentation of the reference nucleic acid, although such provenance is not thereby precluded.

[0138] In theory, an oligonucleotide of 17 nucleotides is of sufficient length as to occur at random less frequently than once in the three gigabase human genome, and thus to provide a nucleic acid probe that can uniquely identify the reference sequence in a nucleic acid mixture of genomic complexity. As is well known, further specificity can be obtained by probing nucleic acid samples of subgenomic complexity, and/or by using plural fragments as short as 17 nucleotides in length collectively to prime amplification of nucleic acids, as, e.g., by polymerase chain reaction (PCR).

[0139] As further described herein below, nucleic acid fragments that encode at least 6 contiguous amino acids (i.e., fragments of 18 nucleotides or more) are useful in directing the expression or the synthesis of peptides that have utility in mapping the epitopes of the protein encoded by the reference nucleic acid. See, e.g., Geysen et al., “Use of peptide synthesis to probe viral antigens for epitopes to a resolution of a single amino acid,” Proc. Natl. Acad. Sci. USA 81:3998-4002 (1984); and U.S. Pat. Nos. 4,708,871 and 5,595,915, the disclosures of which are incorporated herein by reference in their entireties.

[0140] As further described herein below, fragments that encode at least 8 contiguous amino acids (i.e., fragments of 24 nucleotides or more) are useful in directing the expression or the synthesis of peptides that have utility as immunogens. See, e.g., Lerner, “Tapping the immunological repertoire to produce antibodies of predetermined specificity,” Nature 299:592-596 (1982); Shinnick et al., “Synthetic peptide immunogens as vaccines,” Annu. Rev. Microbiol. 37:425-46 (1983); Sutcliffe et al., “Antibodies that react with predetermined sites on proteins,” Science 219:660-6 (1983), the disclosures of which are incorporated herein by reference in their entireties.

[0141] The nucleic acid fragment of the present invention is thus at least 17 nucleotides in length, typically at least 18 nucleotides in length, and often at least 24 nucleotides in length. Often, the nucleic acid of the present invention is at least 25 nucleotides in length, and even 30 nucleotides, 35 nucleotides, 40 nucleotides, or 45 nucleotides in length. Of course, larger fragments having at least 50 nt, at least 100 nt, at least 150 nt, 200 nt, 250 nt, 300 nt, 350 nt, 400 nt, 450 nt, or 500 nt or more are also useful, and at times preferred.

[0142] Having been based upon the mining of genomic sequence, rather than upon surveillance of expressed message, the present invention further provides isolated genome-derived nucleic acids that include portions of the hGDMLP-1 gene.

[0143] The invention particularly provides genome-derived single exon probes.

[0144] As further described in commonly owned and copending U.S. patent application Ser. No. 09/774,203, filed Jan. 29, 2001 and Ser. No. 09/632,366, filed Aug. 3, 2000, and provisional U.S. patent application No. 60/236,359, filed May 26, 2000 and No. 60/236,359, filed Sep. 27, 2000, the disclosures of which are incorporated herein by reference in their entireties, “a single exon probe” comprises at least part of an exon (“reference exon”) and can hybridize detectably under high stringency conditions to transcript-derived nucleic acids that include the reference exon. The single exon probe will not, however, hybridize detectably under high stringency conditions to nucleic acids that lack the reference exon but include one or more exons that are found adjacent to the reference exon in the genome.

[0145] Genome-derived single exon probes typically further comprise, contiguous to a first end of the reference exon portion, a first intronic and/or intergenic sequence that is identically contiguous to the exon in the genome. Often, the genome-derived single exon probe further comprises, contiguous to a second end of the exonic portion, a second intronic and/or intergenic sequence that is identically contiguous to the exon in the genome.

[0146] The minimum length of genome-derived single exon probes is defined by the requirement that the exonic portion be of sufficient length to hybridize under high stringency conditions to transcript-derived nucleic acids. Accordingly, the exon portion is at least 17 nucleotides, typically at least 18 nucleotides, 20 nucleotides, 24 nucleotides, 25 nucleotides or even 30, 35, 40, 45, or 50 nucleotides in length, and can usefully include the entirety of the exon, up to 100 nt, 150 nt, 200 nt, 250 nt, 300 nt, 350 nt, 400 nt or even 500 nt or more in length.

[0147] The maximum length of genome-derived single exon probes is defined by the requirement that the probes contain portions of no more than one exon, that is, be unable to hybridize detectably under high stringency conditions to nucleic acids that lack the reference exon but include one or more exons that are found adjacent to the reference exon in the genome.

[0148] Given variable spacing of exons through eukaryotic genomes, the maximum length of the single exon probes of the present invention is typically no more than 25 kb, often no more than 20 kb, 15 kb, 10 kb or 7.5 kb, or even no more than 5 kb, 4 kb, 3 kb, or even no more than about 2.5 kb in length.

[0149] The genome-derived single exon probes of the present invention can usefully include at least a first terminal priming sequence not found in contiguity with the rest of the probe sequence in the genome, and often will contain a second terminal priming sequence not found in contiguity with the rest of the probe sequence in the genome.

[0150] The present invention also provides isolated genome-derived nucleic acids that include nucleic acid sequence elements that control transcription of the hGDMLP-1 gene.

[0151] With a complete draft of the human genome now available, genomic sequences that are within the vicinity of the hGDMLP-1 gene (and that are additional to those described with particularity herein) can readily be obtained by PCR amplification.

[0152] The isolated nucleic acids of the present invention can be composed of natural nucleotides in native 5′-3′ phosphodiester internucleoside linkage—e.g., DNA or RNA—or can contain any or all of nonnatural nucleotide analogues, nonnative internucleoside bonds, or post-synthesis modifications, either throughout the length of the nucleic acid or localized to one or more portions thereof. As is well known in the art, when the isolated nucleic acid is used as a hybridization probe, the range of such nonnatural analogues, nonnative internucleoside bonds, or post-synthesis modifications will be limited to those that permit sequence-discriminating basepairing of the resulting nucleic acid. When used to direct expression or RNA or protein in vitro or in vivo, the range of such nonnatural analogues, nonnative internucleoside bonds, or post-synthesis modifications will be limited to those that permit the nucleic acid to function properly as a polymerization substrate. When the isolated nucleic acid is used as a therapeutic agent, the range of such changes will be limited to those that do not confer toxicity upon the isolated nucleic acid.

[0153] For example, when desired to be used as probes, the isolated nucleic acids of the present invention can usefully include nucleotide analogues that incorporate labels that are directly detectable, such as radiolabels or fluorophores, or nucleotide analogues that incorporate labels that can be visualized in a subsequent reaction, such as biotin or various haptens.

[0154] Common radiolabeled analogues include those labeled with ³³P, ³²P, and ³⁵S, such as α-³²P-dATP, α-³²P-dCTP, α-³²P-dGTP, α-³²P-dTTP, α-³²P-3'dATP, α-³²P-ATP, α-³²P-CTP, α-³²P-GTP, α-³²P-UTP, α-³⁵S-DATP, γ-³⁵S-GTP, γ-³³P-dATP, and the like.

[0155] Commercially available fluorescent nucleotide analogues readily incorporated into the nucleic acids of the present invention include Cy3-dCTP, Cy3-dUTP, Cy5-dCTP, Cy3-dUTP (Amersham Pharmacia Biotech, Piscataway, N.J., USA), fluorescein-12-dUTP, tetramethylrhodamine-6-dUTP, Texas Red®-5-dUTP, Cascade Blue®-7-dUTP, BODIPY® FL-14-dUTP, BODIPY® TMR-14-dUTP, BODIPY® TR-14-dUTP, Rhodamine Green™-5-dUTP, Oregon Green® 488-5-dUTP, Texas Red®-12-dUTP, BODIPYO 630/650-14-dUTP, BODIPY® 650/665-14-dUTP, Alexa Fluor® 488-5-dUTP, Alexa Fluor® 532-5-dUTP, Alexa Fluor® 568-5-dUTP, Alexa Fluor® 594-5-dUTP, Alexa Fluor® 546-14-dUTP, fluorescein-12-UTP, tetramethylrhodamine-6-UTP, Texas Red®-5-UTP, Cascade Blue®-7-UTP, BODIPY® FL-14-UTP, BODIPYO TMR-14-UTP, BODIPY® TR-14-UTP, Rhodamine Green™-5-UTP, Alexa Fluor® 488-5-UTP, Alexa Fluor® 546-14-UTP (Molecular Probes, Inc. Eugene, Oreg., USA).

[0156] Protocols are available for custom synthesis of nucleotides having other fluorophores. Henegariu et al., “Custom Fluorescent-Nucleotide Synthesis as an Alternative Method for Nucleic Acid Labeling,” Nature Biotechnol. 18:345-348 (2000), the disclosure of which is incorporated herein by reference in its entirety.

[0157] Haptens that are commonly conjugated to nucleotides for subsequent labeling include biotin (biotin-11-dUTP, Molecular Probes, Inc., Eugene, Oreg., USA; biotin-21-UTP, biotin-21-dUTP, Clontech Laboratories, Inc., Palo Alto, Calif., USA), digoxigenin (DIG-11-dUTP, alkali labile, DIG-11-UTP, Roche Diagnostics Corp., Indianapolis, Ind., USA), and dinitrophenyl (dinitrophenyl-11-dUTP, Molecular Probes, Inc., Eugene, Oreg., USA).

[0158] As another example, when desired to be used for antisense inhibition of transcription or translation, the isolated nucleic acids of the present invention can usefully include altered, often nuclease-resistant, internucleoside bonds. See Hartmann et al. (eds.), Manual of Antisense Methodology (Perspectives in Antisense Science), Kluwer Law International (1999) (ISBN:079238539X); Stein et al. (eds.), Applied Antisense Oligonucleotide Technology, Wiley-Liss (cover (1998) (ISBN: 0471172790); Chadwick et al. (eds.), Oligonucleotides as Therapeutic Agents—Symposium No. 209, John Wiley & Son Ltd (1997) (ISBN: 0471972797), the disclosures of which are incorporated herein by reference in their entireties. Such altered internucloside bonds are often desired also when the isolated nucleic acid of the present invention is to be used for targeted gene correction, Gamper et al., Nucl. Acids Res. 28(21):4332-9 (2000), the disclosure of which is incorporated herein by reference in its entirety.

[0159] Modified oligonucleotide backbones often preferred when the nucleic acid is to be used for antisense purposes are, for example, phosphorothioates, chiral phosphorothioates, phosphorodithioates, phosphotriesters, aminoalkylphosphotriesters, methyl and other alkyl phosphonates including 3′-alkylene phosphonates and chiral phosphonates, phosphinates, phosphoramidates including 3′-amino phosphoramidate and aminoalkylphosphoramidates, thionophosphoramidates, thionoalkylphosphonates, thionoalkylphosphotriesters, and boranophosphates having normal 3′-5′ linkages, 2′-5′ linked analogs of these, and those having inverted polarity wherein the adjacent pairs of nucleoside units are linked 3′-5′ to 5′-3′ or 2′-5′ to 5′-2′. Representative U.S. patents that teach the preparation of the above phosphorus-containing linkages include, but are not limited to, U.S. Pat. Nos. 3,687,808; 4,469,863; 4,476,301; 5,023,243; 5,177,196; 5,188,897; 5,264,423; 5,276,019; 5,278,302; 5,286,717; 5,321,131; 5,399,676; 5,405,939; 5,453,496; 5,455,233; 5,466,677; 5,476,925; 5,519,126; 5,536,821; 5,541,306; 5,550,111; 5,563,253; 5,571,799; 5,587,361; and 5,625,050, the disclosures of which are incorporated herein by reference in their entireties.

[0160] Preferred modified oligonucleotide backbones for antisense use that do not include a phosphorus atom have backbones that are formed by short chain alkyl or cycloalkyl internucleoside linkages, mixed heteroatom and alkyl or cycloalkyl internucleoside linkages, or one or more short chain heteroatomic or heterocyclic internucleoside linkages. These include those having morpholino linkages (formed in part from the sugar portion of a nucleoside); siloxane backbones; sulfide, sulfoxide and sulfone backbones; formacetyl and thioformacetyl backbones; methylene formacetyl and thioformacetyl backbones; alkene containing backbones; sulfamate backbones; methyleneimino and methylenehydrazino backbones; sulfonate and sulfonamide backbones; amide backbones; and others having mixed N, O, S and CH₂ component parts. Representative U.S. patents that teach the preparation of the above backbones include, but are not limited to, U.S. Pat. Nos. 5,034,506; 5,166,315; 5,185,444; 5,214,134; 5,216,141; 5,235,033; 5,264,562; 5,264,564; 5,405,938; 5,434,257; 5,466,677; 5,470,967; 5,489,677; 5,541,307; 5,561,225; 5,596,086; 5,602,240; 5,610,289; 5,602,240; 5,608,046; 5,610,289; 5,618,704; 5,623,070; 5,663,312; 5,633,360; 5,677,437; and 5,677,439, the disclosures of which are incorporated herein by reference in their entireties.

[0161] In other preferred oligonucleotide mimetics, both the sugar and the internucleoside linkage are replaced with novel groups, such as peptide nucleic acids (PNA).

[0162] In PNA compounds, the phosphodiester backbone of the nucleic acid is replaced with an amide-containing backbone, in particular by repeating N-(2-aminoethyl) glycine units linked by amide bonds. Nucleobases are bound directly or indirectly to aza nitrogen atoms of the amide portion of the backbone, typically by methylene carbonyl linkages.

[0163] The uncharged nature of the PNA backbone provides PNA/DNA and PNA/RNA duplexes with a higher thermal stability than is found in DNA/DNA and DNA/RNA duplexes, resulting from the lack of charge repulsion between the PNA and DNA or RNA strand. In general, the Tm of a PNA/DNA or PNA/RNA duplex is 1° C. higher per base pair than the Tm of the corresponding DNA/DNA or DNA/RNA duplex (in 100 mM NaCl).

[0164] The neutral backbone also allows PNA to form stable DNA duplexes largely independent of salt concentration. At low ionic strength, PNA can be hybridized to a target sequence at temperatures that make DNA hybridization problematic or impossible. And unlike DNA/DNA duplex formation, PNA hybridization is possible in the absence of magnesium. Adjusting the ionic strength, therefore, is useful if competing DNA or RNA is present in the sample, or if the nucleic acid being probed contains a high level of secondary structure.

[0165] PNA also demonstrates greater specificity in binding to complementary DNA. A PNA/DNA mismatch is more destabilizing than DNA/DNA mismatch. A single mismatch in mixed a PNA/DNA 15-mer lowers the Tm by 8-20° C. (15° C. on average). In the corresponding DNA/DNA duplexes, a single mismatch lowers the Tm by 4-16° C. (11° C. on average). Because PNA probes can be significantly shorter than DNA probes, their specificity is greater.

[0166] Additionally, nucleases and proteases do not recognize the PNA polyamide backbone with nucleobase sidechains. As a result, PNA oligomers are resistant to degradation by enzymes, and the lifetime of these compounds is extended both in vivo and in vitro. In addition, PNA is stable over a wide pH range.

[0167] Because its backbone is formed from amide bonds, PNA can be synthesized using a modified peptide synthesis protocol. PNA oligomers can be synthesized by both Fmoc and tBoc methods. Representative U.S. patents that teach the preparation of PNA compounds include, but are not limited to, U.S. Pat. Nos. 5,539,082; 5,714,331; and 5,719,262, each of which is herein incorporated by reference; automated PNA synthesis is readily achievable on commercial synthesizers (see, e.g., “PNA User's Guide,” Rev. 2, February 1998, Perseptive Biosystems Part No. 60138, Applied Biosystems, Inc., Foster City, Calif.).

[0168] PNA chemistry and applications are reviewed, inter alia, in Ray et al., FASEB J. 14(9):1041-60 (2000); Nielsen et al., Pharmacol Toxicol. 86(1):3-7 (2000); Larsen et al., Biochim Biophys Acta. 1489(1):159-66 (1999); Nielsen, Curr. Opin. Struct. Biol. 9(3):353-7 (1999), and Nielsen, Curr. Opin. Biotechnol. 10(1):71-5 (1999), the disclosures of which are incorporated herein by reference in their entireties.

[0169] Differences from nucleic acid compositions found in nature—e.g., nonnative bases, altered internucleoside linkages, post-synthesis modification—can be present throughout the length of the nucleic acid or can, instead, usefully be localized to discrete portions thereof. As an example of the latter, chimeric nucleic acids can be synthesized that have discrete DNA and RNA domains and demonstrated utility for targeted gene repair, as further described in U.S. Pat. Nos. 5,760,012 and 5,731,181, the disclosures of which are incorporated herein by reference in their entireties. As another example, chimeric nucleic acids comprising both DNA and PNA have been demonstrated to have utility in modified PCR reactions. See Misra et al., Biochem. 37: 1917-1925 (1998); see also Finn et al., Nucl. Acids Res. 24: 3357-3363 (1996), incorporated herein by reference.

[0170] Unless otherwise specified, nucleic acids of the present invention can include any topological conformation appropriate to the desired use; the term thus explicitly comprehends, among others, single-stranded, double-stranded, triplexed, quadruplexed, partially double-stranded, partially-triplexed, partially-quadruplexed, branched, hairpinned, circular, and padlocked conformations. Padlock conformations and their utilities are further described in Baner et al., Curr. Opin. Biotechnol. 12:11-15 (2001); Escude et al., Proc. Natl. Acad. Sci. USA 14;96(19):10603-7 (1999); Nilsson et al., Science 265(5181):2085-8 (1994), the disclosures of which are incorporated herein by reference in their entireties. Triplex and quadruplex conformations, and their utilities, are reviewed in Praseuth et al., Biochim. Biophys. Acta. 1489(1):181-206 (1999); Fox, Curr. Med. Chem. 7(1):17-37 (2000); Kochetkova et al., Methods Mol. Biol. 130:189-201 (2000); Chan et al., J. Mol. Med. 75(4):267-82 (1997), the disclosures of which are incorporated herein by reference in their entireties.

[0171] The nucleic acids of the present invention can be detectably labeled.

[0172] Commonly-used labels include radionuclides, such as ³²P, ³³P, ³⁵S, ³H (and for NMR detection, ¹³C and ¹⁵N), haptens that can be detected by specific antibody or high affinity binding partner (such as avidin), and fluorophores.

[0173] As noted above, detectable labels can be incorporated by inclusion of labeled nucleotide analogues in the nucleic acid. Such analogues can be incorporated by enzymatic polymerization, such as by nick translation, random priming, polymerase chain reaction (PCR), terminal transferase tailing, and end-filling of overhangs, for DNA molecules, and in vitro transcription driven, e.g., from phage promoters, such as T7, T3, and SP6, for RNA molecules. Commercial kits are readily available for each such labeling approach.

[0174] Analogues can also be incorporated during automated solid phase chemical synthesis.

[0175] As is well known, labels can also be incorporated after nucleic acid synthesis, with the 5′ phosphate and 3′ hydroxyl providing convenient sites for post-synthetic covalent attachment of detectable labels.

[0176] Various other post-synthetic approaches permit internal labeling of nucleic acids.

[0177] For example, fluorophores can be attached using a cisplatin reagent that reacts with the N7 of guanine residues (and, to a lesser extent, adenine bases) in DNA, RNA, and PNA to provide a stable coordination complex between the nucleic acid and fluorophore label (Universal Linkage System) (available from Molecular Probes, Inc., Eugene, Oreg., USA and Amersham Pharmacia Biotech, Piscataway, N.J., USA); see Alers et al., Genes, Chromosomes & Cancer, Vol. 25, pp. 301-305 (1999); Jelsma et al., J. NIH Res. 5:82 (1994); Van Belkum et al., BioTechniques 16:148-153 (1994), incorporated herein by reference. As another example, nucleic acids can be labeled using a disulfide-containing linker (FastTag™ Reagent, Vector Laboratories, Inc., Burlingame, Calif., USA) that is photo- or thermally coupled to the target nucleic acid using aryl azide chemistry; after reduction, a free thiol is available for coupling to a hapten, fluorophore, sugar, affinity ligand, or other marker.

[0178] Multiple independent or interacting labels can be incorporated into the nucleic acids of the present invention.

[0179] For example, both a fluorophore and a moiety that in proximity thereto acts to quench fluorescence can be included to report specific hybridization through release of fluorescence quenching, Tyagi et al., Nature Biotechnol. 14: 303-308 (1996); Tyagi et al., Nature Biotechnol. 16, 49-53 (1998); Sokol et al., Proc. Natl. Acad. Sci. USA 95: 11538-11543 (1998); Kostrikis et al., Science 279:1228-1229 (1998); Marras et al., Genet. Anal. 14: 151-156 (1999); U.S. Pat. Nos. 5,846,726, 5,925,517, 5,925,517, or to report exonucleotidic excision, U.S. Pat. No. 5,538,848; Holland et al., Proc. Natl. Acad. Sci. USA 88:7276-7280 (1991); Heid et al., Genome Res. 6(10):986-94 (1996); Kuimelis et al., Nucleic Acids Symp Ser. (37):255-6 (1997); U.S. Pat. No. 5,723,591, the disclosures of which are incorporated herein by reference in their entireties.

[0180] So labeled, the isolated nucleic acids of the present invention can be used as probes, as further described below.

[0181] Nucleic acids of the present invention can also usefully be bound to a substrate. The substrate can porous or solid, planar or non-planar, unitary or distributed; the bond can be covalent or noncovalent. Bound to a substrate, nucleic acids of the present invention can be used as probes in their unlabeled state.

[0182] For example, the nucleic acids of the present invention can usefully be bound to a porous substrate, commonly a membrane, typically comprising nitrocellulose, nylon, or positively-charged derivatized nylon; so attached, the nucleic acids of the present invention can be used to detect hGDMLP-1 nucleic acids present within a labeled nucleic acid sample, either a sample of genomic nucleic acids or a sample of transcript-derived nucleic acids, e.g. by reverse dot blot.

[0183] The nucleic acids of the present invention can also usefully be bound to a solid substrate, such as glass, although other solid materials, such as amorphous silicon, crystalline silicon, or plastics, can also be used. Such plastics include polymethylacrylic, polyethylene, polypropylene, polyacrylate, polymethylmethacrylate, polyvinylchloride, polytetrafluoroethylene, polystyrene, polycarbonate, polyacetal, polysulfone, celluloseacetate, cellulosenitrate, nitrocellulose, or mixtures thereof.

[0184] Typically, the solid substrate will be rectangular, although other shapes, particularly disks and even spheres, present certain advantages. Particularly advantageous alternatives to glass slides as support substrates for array of nucleic acids are optical discs, as described in Demers, “Spatially Addressable Combinatorial Chemical Arrays in CD-ROM Format,” international patent publication WO 98/12559, incorporated herein by reference in its entirety.

[0185] The nucleic acids of the present invention can be attached covalently to a surface of the support substrate or applied to a derivatized surface in a chaotropic agent that facilitates denaturation and adherence by presumed noncovalent interactions, or some combination thereof.

[0186] The nucleic acids of the present invention can be bound to a substrate to which a plurality of other nucleic acids are concurrently bound, hybridization to each of the plurality of bound nucleic acids being separately detectable. At low density, e.g. on a porous membrane, these substrate-bound collections are typically denominated macroarrays; at higher density, typically on a solid support, such as glass, these substrate bound collections of plural nucleic acids are colloquially termed microarrays. As used herein, the term microarray includes arrays of all densities. It is, therefore, another aspect of the invention to provide microarrays that include the nucleic acids of the present invention.

[0187] The isolated nucleic acids of the present invention can be used as hybridization probes to detect, characterize, and quantify hGDMLP-1 nucleic acids in, and isolate hGDMLP-1 nucleic acids from, both genomic and transcript-derived nucleic acid samples. When free in solution, such probes are typically, but not invariably, detectably labeled; bound to a substrate, as in a microarray, such probes are typically, but not invariably, unlabeled.

[0188] For example, the isolated nucleic acids of the present invention can be used as probes to detect and characterize gross alterations in the hGDMLP-1 genomic locus, such as deletions, insertions, translocations, and duplications of the hGDMLP-1 genomic locus through fluorescence in situ hybridization (FISH) to chromosome spreads. See, e.g., Andreeff et al. (eds.), Introduction to Fluorescence In Situ Hybridization: Principles and Clinical Applications, John Wiley & Sons (1999) (ISBN: 0471013455), the disclosure of which is incorporated herein by reference in its entirety. The isolated nucleic acids of the present invention can be used as probes to assess smaller genomic alterations using, e.g., Southern blot detection of restriction fragment length polymorphisms. The isolated nucleic acids of the present invention can be used as probes to isolate genomic clones that include the nucleic acids of the present invention, which thereafter can be restriction mapped and sequenced to identify deletions, insertions, translocations, and substitutions (single nucleotide polymorphisms, SNPs) at the sequence level.

[0189] The isolated nucleic acids of the present invention can be also be used as probes to detect, characterize, and quantify hGDMLP-1 nucleic acids in, and isolate hGDMLP-1 nucleic acids from, transcript-derived nucleic acid samples.

[0190] For example, the isolated nucleic acids of the present invention can be used as hybridization probes to detect, characterize by length, and quantify hGDMLP-1 mRNA by northern blot of total or poly-A+−selected RNA samples. For example, the isolated nucleic acids of the present invention can be used as hybridization probes to detect, characterize by location, and quantify hGDMLP-1 message by in situ hybridization to tissue sections (see, e.g., Schwarchzacher et al., In Situ Hybridization, Springer-Verlag New York (2000) (ISBN: 0387915966), the disclosure of which is incorporated herein by reference in its entirety). For example, the isolated nucleic acids of the present invention can be used as hybridization probes to measure the representation of hGDMLP-1 clones in a cDNA library. For example, the isolated nucleic acids of the present invention can be used as hybridization probes to isolate hGDMLP-1 nucleic acids from cDNA libraries, permitting sequence level characterization of hGDMLP-1 messages, including identification of deletions, insertions, truncations—including deletions, insertions, and truncations of exons in alternatively spliced forms—and single nucleotide polynorphisms.

[0191] All of the aforementioned probe techniques are well within the skill in the art, and are described at greater length in standard texts such as Sambrook et al., Molecular Cloning: A Laboratory Manual (3rd ed.), Cold Spring Harbor Laboratory Press (2001) (ISBN: 0879695773); Ausubel et al. (eds.), Short Protocols in Molecular Biology: A Compendium of Methods from Current Protocols in Molecular Biology (4th ed.), John Wiley & Sons, 1999 (ISBN: 047132938X); and Walker et al. (eds.), The Nucleic Acids Protocols Handbook, Humana Press (2000) (ISBN: 0896034593), the disclosures of which are incorporated herein by reference in their entirety.

[0192] As described in the Examples herein below, the nucleic acids of the present invention can also be used to detect and quantify hGDMLP-1 nucleic acids in transcript-derived samples—that is, to measure expression of the hGDMLP-1 gene—when included in a microarray. Measurement of hGDMLP-1 expression has particular utility in diagnosis of genetic disorders of the hGDMLP-1 gene.

[0193] As would be readily apparent to one of skill in the art, each hGDMLP-1 nucleic acid probe—whether labeled, substrate-bound, or both—is thus currently available for use as a tool for measuring the level of hGDMLP-1 expression in each of the tissues in which expression has already been confirmed, notably in heart and skeletal muscle. The utility is specific to the probe: under high stringency conditions, the probe reports the level of expression of message specifically containing that portion of the hGDMLP-1 gene included within the probe.

[0194] Measuring tools are well known in many arts, not just in molecular biology, and are known to possess credible, specific, and substantial utility. For example, U.S. Pat. No. 6,016,191 describes and claims a tool for measuring characteristics of fluid flow in a hydrocarbon well; U.S. Pat. No. 6,042,549 describes and claims a device for measuring exercise intensity; U.S. Pat. No. 5,889,351 describes and claims a device for measuring viscosity and for measuring characteristics of a fluid; U.S. Pat. No. 5,570,694 describes and claims a device for measuring blood pressure; U.S. Pat. No. 5,930,143 describes and claims a device for measuring the dimensions of machine tools; U.S. Pat. No. 5,279,044 describes and claims a measuring device for determining an absolute position of a movable element; U.S. Pat. No. 5,186,042 describes and claims a device for measuring action force of a wheel; and U.S. Pat. No. 4,246,774 describes and claims a device for measuring the draft of smoking articles such as cigarettes.

[0195] As for tissues not yet demonstrated to express hGDMLP-1, the hGDMLP-1 nucleic acid probes of the present invention are currently available as tools for surveying such tissues to detect the presence of hGDMLP-1 nucleic acids.

[0196] Survey tools—i.e., tools for determining the presence and/or location of a desired object by search of an area—are well known in many arts, not just in molecular biology, and are known to possess credible, specific, and substantial utility. For example, U.S. Pat. No. 6,046,800 describes and claims a device for surveying an area for objects that move; U.S. Pat. No. 6,025,201 describes and claims an apparatus for locating and discriminating platelets from non-platelet particles or cells on a cell-by-cell basis in a whole blood sample; U.S. Pat. No. 5,990,689 describes and claims a device for detecting and locating anomalies in the electromagnetic protection of a system; U.S. Pat. No. 5,984,175 describes and claims a device for detecting and identifying wearable user identification units; U.S. Pat. No. 3,980,986 describes and claims a tool for finding the position of a drill bit working at the bottom of a borehole.

[0197] As noted above, the nucleic acid probes of the present invention are useful in constructing microarrays; the microarrays, in turn, are products of manufacture that are useful for measuring and for surveying gene expression.

[0198] When included on a microarray, each hGDMLP-1 nucleic acid probe makes the microarray specifically useful for detecting that portion of the hGDMLP-1 gene included within the probe, thus imparting upon the microarray device the ability to detect a signal where, absent such probe, it would have reported no signal. This utility makes each individual probe on such microarray akin to an antenna, circuit, firmware or software element included in an electronic apparatus, where the antenna, circuit, firmware or software element imparts upon the apparatus the ability newly and additionally to detect signal in a portion of the radio-frequency spectrum where previously it could not; such devices are known to have specific, substantial, and credible utility.

[0199] Changes in the level of expression need not be observed for the measurement of expression to have utility.

[0200] For example, where gene expression analysis is used to assess toxicity of chemical agents on cells, the failure of the agent to change a gene's expression level is evidence that the drug likely does not affect the pathway of which the gene's expressed protein is a part. Analogously, where gene expression analysis is used to assess side effects of pharmacologic agents—whether in lead compound discovery or in subsequent screening of lead compound derivatives—the inability of the agent to alter a gene's expression level is evidence that the drug does not affect the pathway of which the gene's expressed protein is a part. WO 99/58720, incorporated herein by reference in its entirety, provides methods for quantifying the relatedness of a first and second gene expression profile and for ordering the relatedness of a plurality of gene expression profiles, without regard to the identity or function of the genes whose expression is used in the calculation.

[0201] Gene expression analysis, including gene expression analysis by microarray hybridization, is, of course, principally a laboratory-based art. Devices and apparatus used principally in laboratories to facilitate laboratory research are well-established to possess specific, substantial, and credible utility. For example, U.S. Pat. No. 6,001,233 describes and claims a gel electrophoresis apparatus having a cam-activated clamp; for example, U.S. Pat. No. 6,051,831 describes and claims a high mass detector for use in time-of-flight mass spectrometers; for example, U.S. Pat. No. 5,824,269 describes and claims a flow cytometer—few gel electrophoresis apparatuses, TOF-MS devices, or flow cytometers are sold for home use.

[0202] Indeed, and in particular, nucleic acid microarrays, as devices intended for laboratory use in measuring gene expression, are well-established to have specific, substantial and credible utility. Thus, the microarrays of the present invention have at least the specific, substantial and credible utilities of the microarrays claimed as devices and articles of manufacture in the following U.S. patents, the disclosures of each of which is incorporated herein by reference: U.S. Pat. No. 5,445,934 (“Array of oligonucleotides on a solid substrate”); U.S. Pat. No. 5,744,305 (“Arrays of materials attached to a substrate”); and U.S. Pat. No. 6,004,752 (“Solid support with attached molecules”).

[0203] Genome-derived single exon probes and genome-derived single exon probe microarrays have the additional utility, inter alia, of permitting high-throughput detection of splice variants of the nucleic acids of the present invention, as further described in copending and commonly owned U.S. patent application Ser. No. 09/632,366, filed Aug. 3, 2000, the disclosure of which is incorporated herein by reference in its entirety.

[0204] The isolated nucleic acids of the present invention can also be used to prime synthesis of nucleic acid, for purpose of either analysis or isolation, using mRNA, cDNA, or genomic DNA as template.

[0205] For use as primers, at least 17 contiguous nucleotides of the isolated nucleic acids of the present invention will be used. Often, at least 18, 19, or 20 contiguous nucleotides of the nucleic acids of the present invention will be used, and on occasion at least 20, 22, 24, or 25 contiguous nucleotides of the nucleic acids of the present invention will be used, and even 30 nucleotides or more of the nucleic acids of the present invention can be used to prime specific synthesis.

[0206] The nucleic acid primers of the present invention can be used, for example, to prime first strand cDNA synthesis on an mRNA template.

[0207] Such primer extension can be done directly to analyze the message. Alternatively, synthesis on an mRNA template can be done to produce first strand cDNA. The first strand cDNA can thereafter be used, inter alia, directly as a single-stranded probe, as above-described, as a template for sequencing—permitting identification of alterations, including deletions, insertions, and substitutions, both normal allelic variants and mutations associated with abnormal phenotypes- or as a template, either for second strand cDNA synthesis (e.g., as an antecedent to insertion into a cloning or expression vector), or for amplification.

[0208] The nucleic acid primers of the present invention can also be used, for example, to prime single base extension (SBE) for SNP detection (see, e.g., U.S. Pat. No. 6,004,744, the disclosure of which is incorporated herein by reference in its entirety).

[0209] As another example, the nucleic acid primers of the present invention can be used to prime amplification of hGDMLP-1 nucleic acids, using transcript-derived or genomic DNA as template.

[0210] Primer-directed amplification methods are now well-established in the art. Methods for performing the polymerase chain reaction (PCR) are compiled, inter alia, in McPherson, PCR (Basics: From Background to Bench), Springer Verlag (2000) (ISBN: 0387916008); Innis et al. (eds.), PCR Applications: Protocols for Functional Genomics, Academic Press (1999) (ISBN: 0123721857); Gelfand et al. (eds.), PCR Strategies, Academic Press (1998) (ISBN: 0123721822); Newton et al., PCR, Springer-Verlag New York (1997) (ISBN: 0387915060); Burke (ed.), PCR: Essential Techniques, John Wiley & Son Ltd (1996) (ISBN: 047195697X); White (ed.), PCR Cloning Protocols: From Molecular Cloning to Genetic Engineering, Vol. 67, Humana Press (1996) (ISBN: 0896033430); McPherson et al. (eds.), PCR 2: A Practical Approach, Oxford University Press, Inc. (1995) (ISBN: 0199634254), the disclosures of which are incorporated herein by reference in their entireties. Methods for performing RT-PCR are collected, e.g., in Siebert et al. (eds.), Gene Cloning and Analysis by RT-PCR, Eaton Publishing Company/Bio Techniques Books Division, 1998 (ISBN: 1881299147); Siebert (ed.), PCR Technique:RT-PCR, Eaton Publishing Company/BioTechniques Books (1995) (ISBN:1881299139), the disclosure of which is incorporated herein by reference in its entirety.

[0211] Isothermal amplification approaches, such as rolling circle amplification, are also now well-described. See, e.g., Schweitzer et al., Curr. Opin. Biotechnol. 12(1):21-7 (2001); U.S. Pat. Nos. 5,854,033 and 5,714,320 and international patent publications WO 97/19193 and WO 00/15779, the disclosures of which are incorporated herein by reference in their entireties. Rolling circle amplification can be combined with other techniques to facilitate SNP detection. See, e.g., Lizardi et al., Nature Genet. 19(3):225-32 (1998).

[0212] As further described below, nucleic acids of the present invention, inserted into vectors that flank the nucleic acid insert with a phage promoter, such as T7, T3, or SP6 promoter, can be used to drive in vitro expression of RNA complementary to either strand of the nucleic acid of the present invention. The RNA can be used, inter alia, as a single-stranded probe, in cDNA-mRNA subtraction, or for in vitro translation.

[0213] As will be further discussed herein below, nucleic acids of the present invention that encode hGDMLP-1 protein or portions thereof can be used, inter alia, to express the hGDMLP-1 proteins or protein fragments, either alone, or as part of fusion proteins.

[0214] Expression can be from genomic nucleic acids of the present invention, or from transcript-derived nucleic acids of the present invention.

[0215] Where protein expression is effected from genomic DNA, expression will typically be effected in eukaryotic, typically mammalian, cells capable of splicing introns from the initial RNA transcript. Expression can be driven from episomal vectors, such as EBV-based vectors, or can be effected from genomic DNA integrated into a host cell chromosome. As will be more fully described below, where expression is from transcript-derived (or otherwise intron-less) nucleic acids of the present invention, expression can be effected in wide variety of prokaryotic or eukaryotic cells.

[0216] Expressed in vitro, the protein, protein fragment, or protein fusion can thereafter be isolated, to be used, inter alia, as a standard in immunoassays specific for the proteins, or protein isoforms, of the present invention; to be used as a therapeutic agent, e.g., to be administered as passive replacement therapy in individuals deficient in the proteins of the present invention, or to be administered as a vaccine; to be used for in vitro production of specific antibody, the antibody thereafter to be used, e.g., as an analytical reagent for detection and quantitation of the proteins of the present invention or to be used as an immunotherapeutic agent.

[0217] The isolated nucleic acids of the present invention can also be used to drive in vivo expression of the proteins of the present invention. In vivo expression can be driven from a vector—typically a viral vector, often a vector based upon a replication incompetent retrovirus, an adenovirus, or an adeno-associated virus (AAV)—for purpose of gene therapy. In vivo expression can also be driven from signals endogenous to the nucleic acid or from a vector, often a plasmid vector, such as pVAX1 (Invitrogen, Carlsbad, Calif., USA), for purpose of “naked” nucleic acid vaccination, as further described in U.S. Pat. Nos. 5,589,466; 5,679,647; 5,804,566; 5,830,877; 5,843,913; 5,880,104; 5,958,891; 5,985,847; 6,017,897; 6,110,898; 6,204,250, the disclosures of which are incorporated herein by reference in their entireties.

[0218] The nucleic acids of the present invention can also be used for antisense inhibition of transcription or translation. See Phillips (ed.), Antisense Technology, Part B, Methods in Enzymology Vol. 314, Academic Press, Inc. (1999) (ISBN: 012182215X); Phillips (ed.), Antisense Technology, Part A, Methods in Enzymology Vol. 313, Academic Press, Inc. (1999) (ISBN: 0121822141); Hartmann et al. (eds.), Manual of Antisense Methodology (Perspectives in Antisense Science), Kluwer Law International (1999) (ISBN:079238539X); Stein et al. (eds.), Applied Antisense Oligonucleotide Technology, Wiley-Liss (cover (1998) (ISBN: 0471172790); Agrawal et al. (eds.), Antisense Research and Application, Springer-Verlag New York, Inc. (1998) (ISBN: 3540638334); Lichtenstein et al. (eds.), Antisense Technology: A Practical Approach, Vol. 185, Oxford University Press, INC. (1998) (ISBN: 0199635838); Gibson (ed.), Antisense and Ribozyme Methodology: Laboratory Companion, Chapman & Hall (1997) (ISBN: 3826100794); Chadwick et al. (eds.), Oligonucleotides as Therapeutic Agents—Symposium No. 209, John Wiley & Son Ltd (1997) (ISBN: 0471972797), the disclosures of which are incorporated herein by reference in their entireties.

[0219] Nucleic acids of the present invention that encode full-length human hGDMLP-1 protein isoforms, particularly cDNAs encoding full-length isoforms, have additional, well-recognized, immediate, real world as commercial products of manufacture suitable for sale. For example, Invitrogen Corp. (Carlsbad, Calif., USA), through its Research Genetics subsidiary, sells full length human cDNAs (other than hGDMLP-1) cloned into one of a selection of expression vectors as GeneStorm® expression-ready clones; utility is specific for the gene, since each gene is capable of being ordered separately and has a distinct catalogue number, and utility is substantial, each clone selling for $650.00 US.

[0220] Nucleic acids of the present invention that include genomic regions encoding the human hGDMLP-1 protein, or portions thereof, have yet further utilities.

[0221] For example, genomic nucleic acids of the present invention can be used as amplification substrates, e.g. for preparation of genome-derived single exon probes of the present invention, described above, and further described in copending and commonly-owned U.S. patent application Ser. No. 09/774,203, filed Jan. 29, 2001, and Ser. No. 09/632,366, filed Aug. 3, 2000 and commonly-owned and copending U.S. provisional patent application No. 60/207,456, filed May 26, 2000, No. 60/234,687, filed Sep. 21, 2000, No. 60/236,359, filed Sep. 27, 2000, the disclosures of which are incorporated herein by reference in their entireties.

[0222] As another example, genomic nucleic acids of the present invention can be integrated non-homologously into the genome of somatic cells, with or without amplification of the insertional locus, in order, e.g., to create stable cell lines capable of producing the proteins of the present invention.

[0223] As another example, more fully described herein below, genomic nucleic acids of the present invention can be integrated nonhomologously into embryonic stem (ES) cells to create transgenic non-human animals capable of producing the proteins of the present invention.

[0224] Genomic nucleic acids of the present invention can also be used to target homologous recombination to the human hGDMLP-1 locus. See, e.g., U.S. Pat. Nos. 6,187,305; 6,204,061; 5,631,153; 5,627,059; 5,487,992; 5,464,764; 5,614,396; 5,527,695 and 6,063,630; and Kmiec et al. (eds.), Gene Targeting Protocols, Vol. 133, Humana Press (2000) (ISBN: 0896033600); Joyner (ed.), Gene Targeting: A Practical Approach, Oxford University Press, Inc. (2000) (ISBN: 0199637938); Sedivy et al., Gene Targeting, Oxford University Press (1998) (ISBN: 071677013X); Tymms et al. (eds.), Gene Knockout Protocols, Humana Press (2000) (ISBN: 0896035727); Mak et al. (eds.), The Gene Knockout FactsBook, Vol. 2, Academic Press, Inc. (1998) (ISBN: 0124660444); Torres et al., Laboratory Protocols for Conditional Gene Targeting, Oxford University Press (1997) (ISBN: 019963677X); Vega (ed.), Gene Targeting, CRC Press, LLC (1994) (ISBN: 084938950X), the disclosures of which are incorporated herein by reference in their entireties.

[0225] Where the genomic region includes transcription regulatory elements, homologous recombination can be used to alter the expression of hGDMLP-1, both for purpose of in vitro production of hGDMLP-1 protein from human cells, and for purpose of gene therapy. See, e.g., U.S. Pat. Nos. 5,981,214, 6,048,524; 5,272,071, incorporated herein by reference in their entireties.

[0226] Fragments of the nucleic acids of the present invention smaller than those typically used for homologous recombination can also be used for targeted gene correction or alteration, possibly by cellular mechanisms different from those engaged during homologous recombination.

[0227] For example, partially duplexed RNA/DNA chimeras have been shown to have utility in targeted gene correction, U.S. Pat. Nos. 5,945,339, 5,888,983, 5,871,984, 5,795,972, 5,780,296, 5,760,012, 5,756,325, 5,731,181, the disclosures of which are incorporated herein by reference in their entireties. So too have small oligonucleotides fused to triplexing domains have been shown to have utility in targeted gene correction, Culver et al., “Correction of chromosomal point mutations in human cells with bifunctional oligonucleotides,” Nature Biotechnol. 17(10):989-93 (1999), as have oligonucleotides having modified terminal bases or modified terminal internucleoside bonds, Gamper et al., Nucl. Acids Res. 28(21):4332-9 (2000), the disclosures of which are incorporated herein by reference.

[0228] The isolated nucleic acids of the present invention can also be used to provide the initial substrate for recombinant engineering of hGDMLP-1 protein variants having desired phenotypic improvements. Such engineering includes, for example, site-directed mutagenesis, random mutagenesis with subsequent functional screening, and more elegant schemes for recombinant evolution of proteins, as are described, inter alia, in U.S. Pat. Nos. 6,180,406; 6,165,793; 6,117,679; and 6,096,548, the disclosures of which are incorporated herein by reference in their entireties.

[0229] Nucleic acids of the present invention can be obtained by using the labeled probes of the present invention to probe nucleic acid samples, such as genomic libraries, cDNA libraries, and mRNA samples, by standard techniques. Nucleic acids of the present invention can also be obtained by amplification, using the nucleic acid primers of the present invention, as further demonstrated in Example 1, herein below. Nucleic acids of the present invention of fewer than about 100 nt can also be synthesized chemically, typically by solid phase synthesis using commercially available automated synthesizers.

[0230] Vectors and Host Cells

[0231] In another aspect, the present invention provides vectors that comprise one or more of the isolated nucleic acids of the present invention, and host cells in which such vectors have been introduced.

[0232] The vectors can be used, inter alia, for propagating the nucleic acids of the present invention in host cells (cloning vectors), for shuttling the nucleic acids of the present invention between host cells derived from disparate organisms (shuttle vectors), for inserting the nucleic acids of the present invention into host cell chromosomes (insertion vectors), for expressing sense or antisense RNA transcripts of the nucleic acids of the present invention in vitro or within a host cell, and for expressing polypeptides encoded by the nucleic acids of the present invention, alone or as fusions to heterologous polypeptides. Vectors of the present invention will often be suitable for several such uses.

[0233] Vectors are by now well-known in the art, and are described, inter alia, in Jones et al. (eds.), Vectors: Cloning Applications: Essential Techniques (Essential Techniques Series), John Wiley & Son Ltd 1998 (ISBN: 047196266X); Jones et al. (eds.), Vectors: Expression Systems: Essential Techniques (Essential Techniques Series), John Wiley & Son Ltd, 1998 (ISBN:0471962678); Gacesa et al., Vectors: Essential Data, John Wiley & Sons, 1995 (ISBN: 0471948411); Cid-Arregui (eds.), Viral Vectors: Basic Science and Gene Therapy, Eaton Publishing Co., 2000 (ISBN: 188129935X); Sambrook et al., Molecular Cloning: A Laboratory Manual (3^{rd} ed.), Cold Spring Harbor Laboratory Press, 2001 (ISBN: 0879695773); Ausubel et al. (eds.), Short Protocols in Molecular Biology: A Compendium of Methods from Current Protocols in Molecular Biology (4^{th} ed.), John Wiley & Sons, 1999 (ISBN: 047132938X), the disclosures of which are incorporated herein by reference in their entireties. Furthermore, an enormous variety of vectors are available commercially. Use of existing vectors and modifications thereof being well within the skill in the art, only basic features need be described here.

[0234] Typically, vectors are derived from virus, plasmid, prokaryotic or eukaryotic chromosomal elements, or some combination thereof, and include at least one origin of replication, at least one site for insertion of heterologous nucleic acid, typically in the form of a polylinker with multiple, tightly clustered, single cutting restriction sites, and at least one selectable marker, although some integrative vectors will lack an origin that is functional in the host to be chromosomally modified, and some vectors will lack selectable markers. Vectors of the present invention will further include at least one nucleic acid of the present invention inserted into the vector in at least one location.

[0235] Where present, the origin of replication and selectable markers are chosen based upon the desired host cell or host cells; the host cells, in turn, are selected based upon the desired application.

[0236] For example, prokaryotic cells, typically E. coli, are typically chosen for cloning. In such case, vector replication is predicated on the replication strategies of coliform-infecting phage—such as phage lambda, M13, T7, T3 and P1—or on the replication origin of autonomously replicating episomes, notably the ColE1 plasmid and later derivatives, including pBR322 and the pUC series plasmids. Where E. coli is used as host, selectable markers are, analogously, chosen for selectivity in gram negative bacteria: e.g., typical markers confer resistance to antibiotics, such as ampicillin, tetracycline, chloramphenicol, kanamycin, streptomycin, zeocin; auxotrophic markers can also be used.

[0237] As another example, yeast cells, typically S. cerevisiae, are chosen, inter alia, for eukaryotic genetic studies, due to the ease of targeting genetic changes by homologous recombination and to the ready ability to complement genetic defects using recombinantly expressed proteins, for identification of interacting protein components, e.g. through use of a two-hybrid system, and for protein expression. Vectors of the present invention for use in yeast will typically, but not invariably, contain an origin of replication suitable for use in yeast and a selectable marker that is functional in yeast.

[0238] Integrative YIp vectors do not replicate autonomously, but integrate, typically in single copy, into the yeast genome at low frequencies and thus replicate as part of the host cell chromosome; these vectors lack an origin of replication that is functional in yeast, although they typically have at least one origin of replication suitable for propagation of the vector in bacterial cells. YEp vectors, in contrast, replicate episomally and autonomously due to presence of the yeast 2 micron plasmid origin (2 μm ori). The YCp yeast centromere plasmid vectors are autonomously replicating vectors containing centromere sequences, CEN, and autonomously replicating sequences, ARS; the ARS sequences are believed to correspond to the natural replication origins of yeast chromosomes.

[0239] Selectable markers in yeast vectors include a variety of auxotrophic markers, the most common of which are (in Saccharomyces cerevisiae) URA3, HIS3, LEU2, TRP1 and LYS2, which complement specific auxotrophic mutations, such as ura3-52, his3-D1, leu2-D1, trp1-D1 and lys2-201. The URA3 and LYS2 yeast genes further permit negative selection based on specific inhibitors, 5-fluoro-orotic acid (FOA) and α-aminoadipic acid (αAA), respectively, that prevent growth of the prototrophic strains but allows growth of the ura3 and lys2 mutants, respectively. Other selectable markers confer resistance to, e.g., zeocin.

[0240] As yet another example, insect cells are often chosen for high efficiency protein expression. Where the host cells are from Spodoptera frugiperda—e.g., Sf9 and Sf21 cell lines, and expresSF™ cells (Protein Sciences Corp., Meriden, Conn., USA)—the vector replicative strategy is typically based upon the baculovirus life cycle. Typically, baculovirus transfer vectors are used to replace the wild-type AcMNPV polyhedrin gene with a heterologous gene of interest. Sequences that flank the polyhedrin gene in the wild-type genome are positioned 5′ and 3′ of the expression cassette on the transfer vectors. Following cotransfection with AcMNPV DNA, a homologous recombination event occurs between these sequences resulting in a recombinant virus carrying the gene of interest and the polyhedrin or p10 promoter. Selection can be based upon visual screening for lacZ fusion activity.

[0241] As yet another example, mammalian cells are often chosen for expression of proteins intended as pharmaceutical agents, and are also chosen as host cells for screening of potential agonist and antagonists of a protein or a physiological pathway.

[0242] Where mammalian cells are chosen as host cells, vectors intended for autonomous extrachromosomal replication will typically include a viral origin, such as the SV40 origin (for replication in cell lines expressing the large T-antigen, such as COS1 and COS7 cells), the papillomavirus origin, or the EBV origin for long term episomal replication (for use, e.g., in 293-EBNA cells, which constitutively express the EBV EBNA-1 gene product and adenovirus E1A). Vectors intended for integration, and thus replication as part of the mammalian chromosome, can, but need not, include an origin of replication functional in mammalian cells, such as the SV40 origin. vectors based upon viruses, such as adenovirus, adeno-associated virus, vaccinia virus, and various mammalian retroviruses, will typically replicate according to the viral replicative strategy.

[0243] Selectable markers for use in mammalian cells include resistance to neomycin (G418), blasticidin, hygromycin and to zeocin, and selection based upon the purine salvage pathway using HAT medium.

[0244] Plant cells can also be used for expression, with the vector replicon typically derived from a plant virus (e.g., cauliflower mosaic virus, CaMV; tobacco mosaic virus, TMV) and selectable markers chosen for suitability in plants.

[0245] For propagation of nucleic acids of the present invention that are larger than can readily be accomodated in vectors derived from plasmids or virus, the invention further provides artificial chromosomes—BACs, YACs, and HACs—that comprise hGDMLP-1 nucleic acids, often genomic nucleic acids.

[0246] The BAC system is based on the well-characterized E. coli F-factor, a low copy plasmid that exists in a supercoiled circular form in host cells. The structural features of the F-factor allow stable maintenance of individual human DNA clones as well as easy manipulation of the cloned DNA. See Shizuya et al., Keio J. Med. 50(1):26-30 (2001); Shizuya et al., Proc. Natl. Acad. Sci. USA 89(18):8794-7 (1992).

[0247] YACs are based on yeast linear plasmids, denoted YLp, containing homologous or heterologous DNA sequences that function as telomeres (TEL) in vivo, as well as containing yeast ARS (origins of replication) and CEN (centromeres) segments.

[0248] HACs are human artifical chromosomes. Kuroiwa et al., Nature Biotechnol. 18(10):1086-90 (2000); Henning et al., Proc. Natl. Acad. Sci. USA 96(2):592-7 (1999); Harrington et al., Nature Genet. 15(4):345-55 (1997). In one version, long synthetic arrays of alpha satellite DNA are combined with telomeric DNA and genomic DNA to generate linear microchromosomes that are mitotically and cytogenetically stable in the absence of selection.

[0249] Vectors of the present invention will also often include elements that permit in vitro transcription of RNA from the inserted heterologous nucleic acid. Such vectors typically include a phage promoter, such as that from T7, T3, or SP6, flanking the nucleic acid insert. Often two different such promoters flank the inserted nucleic acid, permitting separate in vitro production of both sense and antisense strands.

[0250] Expression vectors of the present invention—that is, those vectors that will drive expression of polypeptides from the inserted heterologous nucleic acid—will often include a variety of other genetic elements operatively linked to the protein-encoding heterologous nucleic acid insert, typically genetic elements that drive transcription, such as promoters and enhancer elements, those that facilitate RNA processing, such as transcription termination and/or polyadenylation signals, and those that facilitate translation, such as ribosomal consensus sequences.

[0251] For example, vectors for expressing proteins of the present invention in prokaryotic cells, typically E. coli, will include a promoter, often a phage promoter, such as phage lambda pL promoter, the trc promoter, a hybrid derived from the trp and lac promoters, the bacteriophage T7 promoter (in E. coli cells engineered to express the T7 polymerase), or the araBAD operon. Often, such prokaryotic expression vectors will further include transcription terminators, such as the aspA terminator, and elements that facilitate translation, such as a consensus ribosome binding site and translation termination codon, Schomer et al., Proc. Natl. Acad. Sci. USA 83:8506-8510 (1986).

[0252] As another example, vectors for expressing proteins of the present invention in yeast cells, typically S. cerevisiae, will include a yeast promoter, such as the CYC1 promoter, the GAL1 promoter, ADH1 promoter, or the GPD promoter, and will typically have elements that facilitate transcription termination, such as the transcription termination signals from the CYC1 or ADH1 gene.

[0253] As another example, vectors for expressing proteins of the present invention in mammalian cells will include a promoter active in mammalian cells. Such promoters are often drawn from mammalian viruses—such as the enhancer-promoter sequences from the immediate early gene of the human cytomegalovirus (CMV), the enhancer-promoter sequences from the Rous sarcoma virus long terminal repeat (RSV LTR), and the enhancer-promoter from SV40. Often, expression is enhanced by incorporation of polyadenylation sites, such as the late SV40 polyadenylation site and the polyadenylation signal and transcription termination sequences from the bovine growth hormone (BGH) gene, and ribosome binding sites. Furthermore, vectors can include introns, such as intron II of rabbit β-globin gene and the SV40 splice elements.

[0254] Vector-drive protein expression can be constitutive or inducible.

[0255] Inducible vectors include either naturally inducible promoters, such as the trc promoter, which is regulated by the lac operon, and the pL promoter, which is regulated by tryptophan, the MMTV-LTR promoter, which is inducible by dexamethasone, or can contain synthetic promoters and/or additional elements that confer inducible control on adjacent promoters. Examples of inducible synthetic promoters are the hybrid Plac/ara-1 promoter and the PLtetO-1 promoter. The PltetO-1 promoter takes advantage of the high expression levels from the PL promoter of phage lambda, but replaces the lambda repressor sites with two copies of operator 2 of the Tn10 tetracycline resistance operon, causing this promoter to be tightly repressed by the Tet repressor protein and induced in response to tetracycline (Tc) and Tc derivatives such as anhydrotetracycline.

[0256] As another example of inducible elements, hormone response elements, such as the glucocorticoid response element (GRE) and the estrogen response element (ERE), can confer hormone inducibility where vectors are used for expression in cells having the respective hormone receptors. To reduce background levels of expression, elements responsive to ecdysone, an insect hormone, can be used instead, with coexpression of the ecdysone receptor.

[0257] Expression vectors can be designed to fuse the expressed polypeptide to small protein tags that facilitate purification and/or visualization.

[0258] For example, proteins of the present invention can be expressed with a polyhistidine tag that facilitates purification of the fusion protein by immobilized metal affinity chromatography, for example using NiNTA resin (Qiagen Inc., Valencia, Calif., USA) or TALON™ resin (cobalt immobilized affinity chromatography medium, Clontech Labs, Palo Alto, Calif., USA). As another example, the fusion protein can include a chitin-binding tag and self-excising intein, permitting chitin-based purification with self-removal of the fused tag (IMPACT™ system, New England Biolabs, Inc., Beverley, Mass., USA). Alternatively, the fusion protein can include a calmodulin-binding peptide tag, permitting purification by calmodulin affinity resin (Stratagene, La Jolla, Calif., USA), or a specifically excisable fragment of the biotin carboxylase carrier protein, permitting purification of in vivo biotinylated protein using an avidin resin and subsequent tag removal (Promega, Madison, Wis., USA). As another useful alternative, the proteins of the present invention can be expressed as a fusion to glutathione-S-transferase, the affinity and specificity of binding to glutathione permitting purification using glutathione affinity resins, such as Glutathione-Superflow Resin (Clontech Laboratories, Palo Alto, Calif., USA), with subsequent elution with free glutathione; proteins made in such systems can be designed to include heparin, thrombin, or factor Xa protease cleavage sites so that the cloned polypeptide of interest can be released from the GST moiety at will.

[0259] Other tags include, for example, the Xpress epitope, detectable by anti-Xpress antibody (Invitrogen, Carlsbad, Calif., USA), a myc tag, detectable by anti-myc tag antibody, the VS epitope, detectable by anti-VS antibody (Invitrogen, Carlsbad, Calif., USA), FLAG® epitope, detectable by anti-FLAG® antibody (Stratagene, La Jolla, Calif., USA), and the HA epitope.

[0260] For secretion of expressed proteins, vectors can include appropriate sequences that encode secretion signals, such as leader peptides. For example, the pSecTag2 vectors (Invitrogen, Carlsbad, Calif., USA) are 5.2 kb mammalian expression vectors that carry the secretion signal from the V-J2-C region of the mouse Ig kappa-chain for efficient secretion of recombinant proteins from a variety of mammalian cell lines.

[0261] Expression vectors can also be designed to fuse proteins encoded by the heterologous nucleic acid insert to polypeptides larger than purification and/or identification tags. Useful protein fusions include those that permit display of the encoded protein on the surface of a phage or cell, fusions to intrinsically fluorescent proteins, such as those having a green fluorescent protein (GFP)-like chromophore, fusions to the IgG Fc region, and fusions for use in two hybrid systems.

[0262] Vectors for phage display fuse the encoded polypeptide to, e.g., the gene III protein (pIII) or gene VIII protein (pVIII) for display on the surface of filamentous phage, such as M13. See Barbas et al., Phage Display: A Laboratory Manual, Cold Spring Harbor Laboratory Press (2001) (ISBN 0-87969-546-3); Kay et al. (eds.), Phage Display of Peptides and Proteins: A Laboratory Manual, San Diego: Academic Press, Inc., 1996; Abelson et al. (eds.), Combinatorial Chemistry, Methods in Enzymology vol. 267, Academic Press (May 1996).

[0263] Vectors for yeast display, e.g. the pYD1 yeast display vector (Invitrogen, Carlsbad, Calif., USA), use the a-agglutinin yeast adhesion receptor to display recombinant protein on the surface of S. cerevisiae. Vectors for mammalian display, e.g., the pDisplay™ vector (Invitrogen, Carlsbad, Calif., USA), target recombinant proteins using an N-terminal cell surface targeting signal and a C-terminal transmembrane anchoring domain of platelet derived growth factor receptor.

[0264] A wide variety of vectors now exist that fuse proteins encoded by heterologous nucleic acids to the chromophore of the substrate-independent, intrinsically fluorescent green fluorescent protein from Aequorea victoria (“GFP”) and its variants. These proteins are intrinsically fluorescent: the GFP-like chromophore is entirely encoded by its amino acid sequence and can fluoresce without requirement for cofactor or substrate.

[0265] Structurally, the GFP-like chromophore comprises an 11-stranded β-barrel (β-can) with a central α-helix, the central α-helix having a conjugated n-resonance system that includes two aromatic ring systems and the bridge between them. The π-resonance system is created by autocatalytic cyclization among amino acids; cyclization proceeds through an imidazolinone intermediate, with subsequent dehydrogenation by molecular oxygen at the Cα-Cβ bond of a participating tyrosine.

[0266] The GFP-like chromophore can be selected from GFP-like chromophores found in naturally occurring proteins, such as A. victoria GFP (GenBank accession number AAA27721), Renilla reniformis GFP, FP583 (GenBank accession no. AF168419) (DsRed), FP593 (AF272711), FP483 (AF168420), FP484 (AF168424), FP595 (AF246709), FP486 (AF168421), FP538 (AF168423), and FP506 (AF168422), and need include only so much of the native protein as is needed to retain the chromophore's intrinsic fluorescence. Methods for determining the minimal domain required for fluorescence are known in the art. Li et al., “Deletions of the Aequorea victoria Green Fluorescent Protein Define the Minimal Domain Required for Fluorescence,” J. Biol. Chem. 272:28545-28549 (1997).

[0267] Alternatively, the GFP-like chromophore can be selected from GFP-like chromophores modified from those found in nature. Typically, such modifications are made to improve recombinant production in heterologous expression systems (with or without change in protein sequence), to alter the excitation and/or emission spectra of the native protein, to facilitate purification, to facilitate or as a consequence of cloning, or are a fortuitous consequence of research investigation.

[0268] The methods for engineering such modified GFP-like chromophores and testing them for fluorescence activity, both alone and as part of protein fusions, are well-known in the art. Early results of these efforts are reviewed in Heim et al., Curr. Biol. 6:178-182 (1996), incorporated herein by reference in its entirety; a more recent review, with tabulation of useful mutations, is found in Palm et al., “Spectral Variants of Green Fluorescent Protein,” in Green Fluorescent Proteins, Conn (ed.), Methods Enzymol. vol. 302, pp. 378-394 (1999), incorporated herein by reference in its entirety. A variety of such modified chromophores are now commercially available and can readily be used in the fusion proteins of the present invention.

[0269] For example, EGFP (“enhanced GFP”), Cormack et al., Gene 173:33-38 (1996); U.S. Pat. Nos. 6,090,919 and 5,804,387, is a red-shifted, human codon-optimized variant of GFP that has been engineered for brighter fluorescence, higher expression in mammalian cells, and for an excitation spectrum optimized for use in flow cytometers. EGFP can usefully contribute a GFP-like chromophore to the fusion proteins of the present invention. A variety of EGFP vectors, both plasmid and viral, are available commercially (Clontech Labs, Palo Alto, Calif., USA), including vectors for bacterial expression, vectors for N-terminal protein fusion expression, vectors for expression of C-terminal protein fusions, and for bicistronic expression.

[0270] Toward the other end of the emission spectrum, EBFP (“enhanced blue fluorescent protein”) and BFP2 contain four amino acid substitutions that shift the emission from green to blue, enhance the brightness of fluorescence and improve solubility of the protein, Heim et al., Curr. Biol. 6:178-182 (1996); Cormack et al., Gene 173:33-38 (1996). EBFP is optimized for expression in mammalian cells whereas BFP2, which retains the original jellyfish codons, can be expressed in bacteria; as is further discussed below, the host cell of production does not affect the utility of the resulting fusion protein. The GFP-like chromophores from EBFP and BFP2 can usefully be included in the fusion proteins of the present invention, and vectors containing these blue-shifted variants are available from Clontech Labs (Palo Alto, Calif., USA).

[0271] Analogously, EYFP (“enhanced yellow fluorescent protein”), also available from Clontech Labs, contains four amino acid substitutions, different from EBFP, Ormö et al., Science 273:1392-1395 (1996), that shift the emission from green to yellowish-green. Citrine, an improved yellow fluorescent protein mutant, is described in Heikal et al., Proc. Natl. Acad. Sci. USA 97:11996-12001 (2000). ECFP (“enhanced cyan fluorescent protein”) (Clontech Labs, Palo Alto, Calif., USA) contains six amino acid substitutions, one of which shifts the emission spectrum from green to cyan. Heim et al., Curr. Biol. 6:178-182 (1996); Miyawaki et al., Nature 388:882-887 (1997). The GFP-like chromophore of each of these GFP variants can usefully be included in the fusion proteins of the present invention.

[0272] The GFP-like chromophore can also be drawn from other modified GFPs, including those described in U.S. Pat. Nos. 6,124,128; 6,096,865; 6,090,919; 6,066,476; 6,054,321; 6,027,881; 5,968,750; 5,874,304; 5,804,387; 5,777,079; 5,741,668; and 5,625,048, the disclosures of which are incorporated herein by reference in their entireties. See also Conn (ed.), Green Fluorescent Protein, Methods in Enzymology, vol. 302, Academic Press, Inc. 1999 (ISBN: 0121822036).

[0273] Fusions to the IgG Fc region increase serum half life of protein pharmaceutical products through interaction with the FcRn receptor (also denominated the FcRp receptor and the Brambell receptor, FcRb), further described in international patent application nos. WO 97/43316, WO 97/34631, WO 96/32478, WO 96/18412, incorporated herein by reference in their entireties.

[0274] For long-term, high-yield recombinant production of the proteins, protein fusions, and protein fragments of the present invention, stable expression is preferred.

[0275] Stable expression is readily achieved by integration into the host cell genome of vectors having selectable markers, followed by selection for integrants.

[0276] For example, the pUB6/V5-His A, B, and C vectors (Invitrogen, Carlsbad, Calif., USA) are designed for high-level stable expression of heterologous proteins in a wide range of mammalian tissue types and cell lines. pUB6/V5-His uses the promoter/enhancer sequence from the human ubiquitin C gene to drive expression of recombinant proteins: expression levels in 293, CHO, and NIH3T3 cells are comparable to levels from the CMV and human EF-1a promoters. The bsd gene permits rapid selection of stably transfected mammalian cells with the potent antibiotic blasticidin.

[0277] Replication incompetent retroviral vectors, typically derived from Moloney murine leukemia virus, prove particularly useful for creating stable transfectants having integrated provirus. The highly efficient transduction machinery of retroviruses, coupled with the availability of a variety of packaging cell lines—such as RetroPack™PT 67, EcoPack2™-293, AmphoPack-293, GP2-293 cell lines (all available from Clontech Laboratories, Palo Alto, Calif., USA)—allow a wide host range to be infected with high efficiency; varying the multiplicity of infection readily adjusts the copy number of the integrated provirus. Retroviral vectors are available with a variety of selectable markers, such as resistance to neomycin, hygromycin, and puromycin, permitting ready selection of stable integrants.

[0278] The present invention further includes host cells comprising the vectors of the present invention, either present episomally within the cell or integrated, in whole or in part, into the host cell chromosome.

[0279] Among other considerations, some of which are described above, a host cell strain may be chosen for its ability to process the expressed protein in the desired fashion. Such post-translational modifications of the polypeptide include, but are not limited to, acetylation, carboxylation, glycosylation, phosphorylation, lipidation, and acylation, and it is an aspect of the present invention to provide hGDMLP-1 proteins with such post-translational modifications.

[0280] As noted earlier, host cells can be prokaryotic or eukaryotic.

[0281] Representative examples of appropriate host cells include, but are not limited to, bacterial cells, such as E. coli, Caulobacter crescentus, Streptomyces species, and Salmonella typhimurium; yeast cells, such as Saccharomyces cerevisiae, Schizosaccharomyces pombe, Pichia pastoris, Pichia methanolica; insect cell lines, such as those from Spodoptera frugiperda—e.g., Sf9 and Sf21 cell lines, and expresSF™ cells (Protein Sciences Corp., Meriden, Conn., USA)—Drosophila S2 cells, and Trichoplusia ni High Five® Cells (Invitrogen, Carlsbad, Calif., USA); and mammalian cells. Typical mammalian cells include COS1 and COS7 cells, chinese hamster ovary (CHO) cells, NIH 3T3 cells, 293 cells, HEPG2 cells, HeLa cells, L cells, HeLa, MDCK, HEK293, WI38, murine ES cell lines (e.g., from strains 129/SV, C57/BL6, DBA-1, 129/SVJ), K562, Jurkat cells, and BW5147. Other mammalian cell lines are well known and readily available from the American Type Culture Collection (ATCC) (Manassas, Va., USA) and the National Institute of General medical Sciences (NIGMS) Human Genetic Cell Repository at the Coriell Cell Repositories (Camden, N.J., USA).

[0282] Methods for introducing the vectors and nucleic acids of the present invention into the host cells are well known in the art; the choice of technique will depend primarily upon the specific vector to be introduced and the host cell chosen.

[0283] For example, phage lambda vectors will typically be packaged using a packaging extract (e.g., Gigapack® packaging extract, Stratagene, La Jolla, Calif., USA), and the packaged virus used to infect E. coli. Plasmid vectors will typically be introduced into chemically competent or electrocompetent bacterial cells.

[0284] E. coli cells can be rendered chemically competent by treatment, e.g., with CaCl₂, or a solution of Mg²⁺, Mn²⁺, Ca²⁺, Rb⁺ or K⁺, dimethyl sulfoxide, dithiothreitol, and hexamine cobalt (III), Hanahan, J. Mol. Biol. 166(4):557-80 (1983), and vectors introduced by heat shock. A wide variety of chemically competent strains are also available commercially (e.g., Epicurian Coli® XL10-Gold® Ultracompetent Cells (Stratagene, La Jolla, Calif., USA); DH5a competent cells (Clontech Laboratories, Palo Alto, Calif., USA); TOP10 Chemically Competent E. coli Kit (Invitrogen, Carlsbad, Calif., USA)).

[0285] Bacterial cells can be rendered electrocompetent—that is, competent to take up exogenous DNA by electroporation—by various pre-pulse treatments; vectors are introduced by electroporation followed by subsequent outgrowth in selected media. An extensive series of protocols is provided online in Electroprotocols (BioRad, Richmond, Calif., USA) (http://www.bio-rad.com/LifeScience/pdf/New_Gene_Pulser.pdf).

[0286] Vectors can be introduced into yeast cells by spheroplasting, treatment with lithium salts, electroporation, or protoplast fusion.

[0287] Spheroplasts are prepared by the action of hydrolytic enzymes—a snail-gut extract, usually denoted Glusulase, or Zymolyase, an enzyme from Arthrobacter luteus—to remove portions of the cell wall in the presence of osmotic stabilizers, typically 1 M sorbitol. DNA is added to the spheroplasts, and the mixture is co-precipitated with a solution of polyethylene glycol (PEG) and Ca²⁺. Subsequently, the cells are resuspended in a solution of sorbitol, mixed with molten agar and then layered on the surface of a selective plate containing sorbitol. For lithium-mediated transformation, yeast cells are treated with lithium acetate, which apparently permeabilizes the cell wall, DNA is added and the cells are co-precipitated with PEG. The cells are exposed to a brief heat shock, washed free of PEG and lithium acetate, and subsequently spread on plates containing ordinary selective medium. Increased frequencies of transformation are obtained by using specially-prepared single-stranded carrier DNA and certain organic solvents. Schiestl et al., Curr. Genet. 16(5-6):339-46 (1989). For electroporation, freshly-grown yeast cultures are typically washed, suspended in an osmotic protectant, such as sorbitol, mixed with DNA, and the cell suspension pulsed in an electroporation device. Subsequently, the cells are spread on the surface of plates containing selective media. Becker et al., Methods Enzymol. 194:182-7 (1991). The efficiency of transformation by electroporation can be increased over 100-fold by using PEG, single-stranded carrier DNA and cells that are in late log-phase of growth. Larger constructs, such as YACs, can be introduced by rotoplast fusion.

[0288] Mammalian and insect cells can be directly infected by packaged viral vectors, or transfected by chemical or electrical means.

[0289] For chemical transfection, DNA can be coprecipitated with CaPO₄ or introduced using liposomal and nonliposomal lipid-based agents. Commercial kits are available for CaPO₄ transfection (CalPhos™ Mammalian Transfection Kit, Clontech Laboratories, Palo Alto, Calif., USA), and lipid-mediated transfection can be practiced using commercial reagents, such as LIPOFECTAMINE™ 2000, LIPOFECTAMINE™ Reagent, CELLFECTIN® Reagent, and LIPOFECTIN® Reagent (Invitrogen, Carlsbad, Calif., USA), DOTAP Liposomal Transfection Reagent, FuGENE 6, X-tremeGENE Q2, DOSPER, (Roche Molecular Biochemicals, Indianapolis, Ind. USA), Effectene™, PolyFect®, Superfect® (Qiagen, Inc., Valencia, Calif., USA). Protocols for electroporating mammalian cells can be found online in Electroprotocols (Bio-Rad, Richmond, Calif., USA) (http://www.bio-rad.com/LifeScience/pdf/New_Gene_Pulser.pdf). See also, Norton et al. (eds.), Gene Transfer Methods: Introducing DNA into Living Cells and Organisms, BioTechniques Books, Eaton Publishing Co. (2000) (ISBN 1-881299-34-1), incorporated herein by reference in its entirety.

[0290] Other transfection techniques include transfection by particle embardment. See, e.g., Cheng et al., Proc. Natl. Acad. Sci. USA 90(10):4455-9 (1993); Yang et al., Proc. Natl. Acad. Sci. USA 87(24):9568-72 (1990).

[0291] Proteins

[0292] In another aspect, the present invention provides hGDMLP-1 proteins, various fragments thereof suitable for use as antigens (e.g., for epitope mapping) and for use as immunogens (e.g., for raising antibodies or as vaccines), fusions of hGDMLP-1 polypeptides and fragments to heterologous polypeptides, and conjugates of the proteins, fragments, and fusions of the present invention to other moieties (e.g., to carrier proteins, to fluorophores).

[0293] FIG. 2 presents the predicted amino acid sequence encoded by the hGDMLP-1cDNA clone. The amino acid sequence is further presented, respectively, in the Sequence Listing.

[0294] Unless otherwise indicated, amino acid sequences of the proteins of the present invention were determined as a predicted translation from a nucleic acid sequence. Accordingly, any amino acid sequence presented herein may contain errors due to errors in the nucleic acid sequence, as described in detail above. Furthermore, single nucleotide polymorphisms (SNPs) occur frequently in eukaryotic genomes—more than 1.4 million SNPs have already identified in the human genome, International Human Genome Sequencing Consortium, Nature 409:860-921 (2001)—and the sequence determined from one individual of a species may differ from other allelic forms present within the population. Small deletions and insertions can often be found that do not alter the function of the protein.

[0295] Accordingly, it is an aspect of the present invention to provide proteins not only identical in sequence to those described with particularity herein, but also to provide isolated proteins at least about 65% identical in sequence to those described with particularity herein, typically at least about 70%, 75%, 80%, 85%, or 90% identical in sequence to those described with particularity herein, usefully at least about 91%, 92%, 93%, 94%, or 95% identical in sequence to those described with particularity herein, usefully at least about 96%, 97%, 98%, or 99% identical in sequence to those described with particularity herein, and, most conservatively, at least about 99.5%, 99.6%, 99.7%, 99.8% and 99.9% identical in sequence to those described with particularity herein. These sequence variants can be naturally occurring or can result from human intervention by way of random or directed mutagenesis.

[0296] For purposes herein, percent identity of two amino acid sequences is determined using the procedure of Tatiana et al., “Blast 2 sequences—a new tool for comparing protein and nucleotide sequences”, FEMS Microbiol Lett. 174:247-250 (1999), which procedure is effectuated by the computer program BLAST 2 SEQUENCES, available online at

[0297] http://www.ncbi.nlm.nih.gov/blast/b12seq/b12.html,

[0298] To assess percent identity of amino acid sequences, the BLASTP module of BLAST 2 SEQUENCES is used with default values of (i) BLOSUM62 matrix, Henikoff et al., Proc. Natl. Acad. Sci USA 89(22):10915-9 (1992); (ii) open gap 11 and extension gap 1 penalties; and (iii) gap x_dropoff 50 expect 10 word size 3 filter, and both sequences are entered in their entireties.

[0299] As is well known, amino acid substitutions occur frequently among natural allelic variants, with conservative substitutions often occasioning only de minimis change in protein function.

[0300] Accordingly, it is an aspect of the present invention to provide proteins not only identical in sequence to those described with particularity herein, but also to provide isolated proteins having the sequence of hGDMLP-1 proteins, or portions thereof, with conservative amino acid substitutions. It is a further aspect to provide isolated proteins having the sequence of hGDMLP-1 proteins, and portions thereof, with moderately conservative amino acid substitutions. These conservatively-substituted or moderately conservatively-substituted variants can be naturally occurring or can result from human intervention.

[0301] Although there are a variety of metrics for calling conservative amino acid substitutions, based primarily on either observed changes among evolutionarily related proteins or on predicted chemical similarity, for purposes herein a conservative replacement is any change having a positive value in the PAM250 log-likelihood matrix reproduced herein below (see Gonnet et al., Science 256(5062):1443-5 (1992)):

| | A | R | N | D | C | Q | E | G | H | I | L | K | M | F | P | S | T | W | Y | V |
|---|---|---|---|---|---|---|---|---|---|---|---|---|---|---|---|---|---|---|---|---|
| A | 2 | −1 | 0 | 0 | 0 | 0 | 0 | 0 | −1 | −1 | −1 | 0 | −1 | −2 | 0 | 1 | 1 | −4 | −2 | 0 |
| R | −1 | 5 | 0 | 0 | −2 | 2 | 0 | −1 | 1 | −2 | −2 | 3 | −2 | −3 | −1 | 0 | 0 | −2 | −2 | −2 |
| N | 0 | 0 | 4 | 2 | −2 | 1 | 1 | 0 | 1 | −3 | −3 | 1 | −2 | −3 | −1 | 1 | 0 | −4 | −1 | −2 |
| D | 0 | 0 | 2 | 5 | −3 | 1 | 3 | 0 | 0 | −4 | −4 | 0 | −3 | −4 | −1 | 0 | 0 | −5 | −3 | −3 |
| C | 0 | −2 | −2 | −3 | 12 | −2 | −3 | −2 | −1 | −1 | −2 | −3 | −1 | −1 | −3 | 0 | 0 | −1 | 0 | 0 |
| Q | 0 | 2 | 1 | 1 | −2 | 3 | 2 | −1 | 1 | −2 | −2 | 2 | −1 | −3 | 0 | 0 | 0 | −3 | −2 | −2 |
| E | 0 | 0 | 1 | 3 | −3 | 2 | 4 | −1 | 0 | −3 | −3 | 1 | −2 | −4 | 0 | 0 | 0 | −4 | −3 | −2 |
| G | 0 | −1 | 0 | 0 | −2 | −1 | −1 | 7 | −1 | −4 | −4 | −1 | −4 | −5 | −2 | 0 | −1 | −4 | −4 | −3 |
| H | −1 | 1 | 1 | 0 | −1 | 1 | 0 | −1 | 6 | −2 | −2 | 1 | −1 | 0 | −1 | 0 | 0 | −1 | 2 | −2 |
| I | −1 | −2 | −3 | −4 | −1 | −2 | −3 | −4 | −2 | 4 | 3 | −2 | 2 | 1 | −3 | −2 | −1 | −2 | −1 | 3 |
| L | −1 | −2 | −3 | −4 | −2 | −2 | −3 | −4 | −2 | 3 | 4 | −2 | 3 | 2 | −2 | −2 | −1 | −1 | 0 | 2 |
| K | 0 | 3 | 1 | 0 | −3 | 2 | 1 | −1 | 1 | −2 | −2 | 3 | −1 | −3 | −1 | 0 | 0 | −4 | −2 | −2 |
| M | −1 | −2 | −2 | −3 | −1 | −1 | −2 | −4 | −1 | 2 | 3 | −1 | 4 | 2 | −2 | −1 | −1 | −1 | 0 | 2 |
| F | −2 | −3 | −3 | −4 | −1 | −3 | −4 | −5 | 0 | 1 | 2 | −3 | 2 | 7 | −4 | −3 | −2 | 4 | 5 | 0 |
| P | 0 | −1 | −1 | −1 | −3 | 0 | 0 | −2 | −1 | −3 | −2 | −1 | −2 | −4 | 8 | 0 | 0 | −5 | −3 | −2 |
| S | 1 | 0 | 1 | 0 | 0 | 0 | 0 | 0 | 0 | −2 | −2 | 0 | −1 | −3 | 0 | 2 | 2 | −3 | −2 | −1 |
| T | 1 | 0 | 0 | 0 | 0 | 0 | 0 | −1 | 0 | −1 | −1 | 0 | −1 | −2 | 0 | 2 | 2 | −4 | −2 | 0 |
| W | −4 | −2 | −3 | −5 | −1 | −3 | −4 | −4 | −1 | −2 | −1 | −4 | −1 | 4 | −5 | −3 | −4 | 14 | 4 | −3 |
| Y | −2 | −2 | −1 | −3 | 0 | −2 | −3 | −4 | 2 | −1 | 0 | −2 | 0 | 5 | −3 | −2 | −2 | 4 | 8 | −1 |
| V | 0 | −2 | −2 | −3 | 0 | −2 | −2 | −3 | −2 | 3 | 2 | −2 | 2 | 0 | −2 | −1 | 0 | −3 | −1 | 3 |

[0302] For purposes herein, a “moderately conservative” replacement is any change having a nonnegative value in the PAM250 log-likelihood matrix reproduced herein above.

[0303] As is also well known in the art, relatedness of proteins can also be characterized using a functional test, the ability of the encoding nucleic acids to base-pair to one another at defined hybridization stringencies.

[0304] It is, therefore, another aspect of the invention to provide isolated proteins not only identical in sequence to those described with particularity herein, but also to provide isolated proteins (“hybridization related proteins”) that are encoded by nucleic acids that hybridize under high stringency conditions (as defined herein above) to all or to a portion of various of the isolated nucleic acids of the present invention (“reference nucleic acids”). It is a further aspect of the invention to provide isolated proteins (“hybridization related proteins”) that are encoded by nucleic acids that hybridize under moderate stringency conditions (as defined herein above) to all or to a portion of various of the isolated nucleic acids of the present invention (“reference nucleic acids”).

[0305] The hybridization related proteins can be alternative isoforms, homologues, paralogues, and orthologues of the hGDMLP-1 protein of the present invention. Particularly useful orthologues are those from other primate species, such as chimpanzee, rhesus macaque monkey, baboon, orangutan, and gorilla; from rodents, such as rats, mice, guinea pigs; from lagomorphs, such as rabbits, and from domestic livestock, such as cow, pig, sheep, horse, goat.

[0306] Relatedness of proteins can also be characterized using a second functional test, the ability of a first protein competitively to inhibit the binding of a second protein to an antibody.

[0307] It is, therefore, another aspect of the present invention to provide isolated proteins not only identical in sequence to those described with particularity herein, but also to provide isolated proteins (“cross-reactive proteins”) that competitively inhibit the binding of antibodies to all or to a portion of various of the isolated hGDMLP-1 proteins of the present invention (“reference proteins”). Such competitive inhibition can readily be determined using immunoassays well known in the art.

[0308] Among the proteins of the present invention that differ in amino acid sequence from those described with particularity herein—including those that have deletions and insertions causing up to 10% non-identity, those having conservative or moderately conservative substitutions, hybridization related proteins, and cross-reactive proteins—those that are biologically active, i.e., that retain at least one structural, regulatory, or biological or biochemical activity of hGDMLP-1. As described above, and further described in Example 1, below, those activities include ATPase activity, actin-binding, calmodulin binding, possession of an IQ domain, and possession of a myosin heavy chain-like tail.

[0309] Residues that are tolerant of change while retaining function can be identified by altering the protein at known residues using methods known in the art, such as alanine scanning mutagenesis, Cunningham et al., Science 244(4908):1081-5 (1989); transposon linker scanning mutagenesis, Chen et al., Gene 263(1-2):39-48 (2001); combinations of homolog- and alanine-scanning mutagenesis, Jin et al., J. Mol. Biol. 226(3):851-65 (1992); combinatorial alanine scanning, Weiss et al., Proc. Natl. Acad. Sci USA 97(16):8950-4 (2000), followed by functional assay. Transposon linker scanning kits are available commercially (New England Biolabs, Beverly, Mass., USA, catalog. no. E7-102S; EZ::TN™ In-Frame Linker Insertion Kit, catalogue no. EZI04KN, Epicentre Technologies Corporation, Madison, Wis., USA).

[0310] As further described below, the isolated proteins of the present invention can readily be used as specific immunogens to raise antibodies that specifically recognize hGDMLP-1 proteins, their isoforms, homologues, paralogues, and/or orthologues. The antibodies, in turn, can be used, inter alia, specifically to assay for the hGDMLP-1 proteins of the present invention—e.g. by ELISA for detection of protein fluid samples, such as serum, by immunohistochemistry or laser scanning cytometry, for detection of protein in tissue samples, or by flow cytometry, for detection of intracellular protein in cell suspensions—for specific antibody-mediated isolation and/or purification of hGDMLP-1 proteins, as for example by immunoprecipitation, and for use as specific agonists or antagonists of hGDMLP-1 action.

[0311] The isolated proteins of the present invention are also immediately available for use as specific standards in assays used to determine the concentration and/or amount specifically of the hGDMLP-1 proteins of the present invention. As is well known, ELISA kits for detection and quantitation of protein analytes typically include isolated and purified protein of known concentration for use as a measurement standard (e.g., the human interferon-y OptEIA kit, catalog no. 555142, Pharmingen, San Diego, Calif., USA includes human recombinant gamma interferon, baculovirus produced).

[0312] The isolated proteins of the present invention are also immediately available for use as specific biomolecule capture probes for surface-enhanced laser desorption ionization (SELDI) detection of protein-protein interactions, WO 98/59362; WO 98/59360; WO 98/59361; and Merchant et al., Electrophoresis 21(6):1164-77 (2000), the disclosures of which are incorporated herein by reference in their entireties. Analogously, the isolated proteins of the present invention are also immediately available for use as specific biomolecule capture probes on BIACORE surface plasmon resonance probes. See Weinberger et al., Pharmacogenomics 1(4):395-416 (2000); Malmqvist, Biochem. Soc. Trans. 27(2):335-40 (1999).

[0313] The isolated proteins of the present invention are also useful as a therapeutic supplement in patients having a specific deficiency in hGDMLP-1 production.

[0314] In another aspect, the invention also provides fragments of various of the proteins of the present invention. The protein fragments are useful, inter alia, as antigenic and immunogenic fragments of hGDMLP-1.

[0315] By “fragments” of a protein is here intended isolated proteins (equally, polypeptides, peptides, oligopeptides), however obtained, that have an amino acid sequence identical to a portion of the reference amino acid sequence, which portion is at least 6 amino acids and less than the entirety of the reference nucleic acid. As so defined, “fragments” need not be obtained by physical fragmentation of the reference protein, although such provenance is not thereby precluded.

[0316] Fragments of at least 6 contiguous amino acids are useful in mapping B cell and T cell epitopes of the reference protein. See, e.g., Geysen et al., “Use of peptide synthesis to probe viral antigens for epitopes to a resolution of a single amino acid,” Proc. Natl. Acad. Sci. USA 81:3998-4002 (1984) and U.S. Pat. Nos. 4,708,871 and 5,595,915, the disclosures of which are incorporated herein by reference in their entireties. Because the fragment need not itself be immunogenic, part of an immunodominant epitope, nor even recognized by native antibody, to be useful in such epitope mapping, all fragments of at least 6 amino acids of the proteins of the present invention have utility in such a study.

[0317] Fragments of at least 8 contiguous amino acids, often at least 15 contiguous amino acids, have utility as immunogens for raising antibodies that recognize the proteins of the present invention. See, e.g., Lerner, “Tapping the immunological repertoire to produce antibodies of predetermined specificity,” Nature 299:592-596 (1982); Shinnick et al., “Synthetic peptide immunogens as vaccines,” Annu. Rev. Microbiol. 37:425-46 (1983); Sutcliffe et al., “Antibodies that react with predetermined sites on proteins,” Science 219:660-6 (1983), the disclosures of which are incorporated herein by reference in their entireties. As further described in the above-cited references, virtually all 8-mers, conjugated to a carrier, such as a protein, prove immunogenic—that is, prove capable of eliciting antibody for the conjugated peptide; accordingly, all fragments of at least 8 amino acids of the proteins of the present invention have utility as immunogens.

[0318] Fragments of at least 8, 9, 10 or 12 contiguous amino acids are also useful as competitive inhibitors of binding of the entire protein, or a portion thereof, to antibodies (as in epitope mapping), and to natural binding partners, such as subunits in a multimeric complex or to receptors or ligands of the subject protein; this competitive inhibition permits identification and separation of molecules that bind specifically to the protein of interest, U.S. Pat. Nos. 5,539,084 and 5,783,674, incorporated herein by reference in their entireties.

[0319] The protein, or protein fragment, of the present invention is thus at least 6 amino acids in length, typically at least 8, 9, 10 or 12 amino acids in length, and often at least 15 amino acids in length. Often, the protein or the present invention, or fragment thereof, is at least 20 amino acids in length, even 25 amino acids, 30 amino acids, 35 amino acids, or 50 amino acids or more in length. Of course, larger fragments having at least 75 amino acids, 100 amino acids, or even 150 amino acids are also useful, and at times preferred.

[0320] The present invention further provides fusions of each of the proteins and protein fragments of the present invention to heterologous polypeptides.

[0321] By fusion is here intended that the protein or protein fragment of the present invention is linearly contiguous to the heterologous polypeptide in a peptide-bonded polymer of amino acids or amino acid analogues; by “heterologous polypeptide” is here intended a polypeptide that does not naturally occur in contiguity with the protein or protein fragment of the present invention. As so defined, the fusion can consist entirely of a plurality of fragments of the hGDMLP-1 protein in altered arrangement; in such case, any of the hGDMLP-1 fragments can be considered heterologous to the other hGDMLP-1 fragments in the fusion protein. More typically, however, the heterologous polypeptide is not drawn from the hGDMLP-1 protein itself.

[0322] The fusion proteins of the present invention will include at least one fragment of the protein of the present invention, which fragment is at least 6, typically at least 8, often at least 15, and usefully at least 16, 17, 18, 19, or 20 amino acids long. The fragment of the protein of the present to be included in the fusion can usefully be at least 25 amino acids long, at least 50 amino acids long, and can be at least 75, 100, or even 150 amino acids long. Fusions that include the entirety of the proteins of the present invention have particular utility.

[0323] The heterologous polypeptide included within the fusion protein of the present invention is at least 6 amino acids in length, often at least 8 amino acids in length, and usefully at least 15, 20, and 25 amino acids in length. Fusions that include larger polypeptides, such as the IgG Fc region, and even entire proteins (such as GFP chromophore-containing proteins), have particular utility.

[0324] As described above in the description of vectors and expression vectors of the present invention, which discussion is incorporated here by reference in its entirety, heterologous polypeptides to be included in the fusion proteins of the present invention can usefully include those designed to facilitate purification and/or visualization of recombinantly-expressed proteins. Although purification tags can also be incorporated into fusions that are chemically synthesized, chemical synthesis typically provides sufficient purity that further purification by HPLC suffices; however, visualization tags as above described retain their utility even when the protein is produced by chemical synthesis, and when so included render the fusion proteins of the present invention useful as directly detectable markers of hGDMLP-1 presence.

[0325] As also discussed above, heterologous polypeptides to be included in the fusion proteins of the present invention can usefully include those that facilitate secretion of recombinantly expressed proteins—into the periplasmic space or extracellular milieu for prokaryotic hosts, into the culture medium for eukaryotic cells—through incorporation of secretion signals and/or leader sequences.

[0326] Other useful protein fusions of the present invention include those that permit use of the protein of the present invention as bait in a yeast two-hybrid system. See Bartel et al. (eds.), The Yeast Two-Hybrid System, Oxford University Press (1997) (ISBN: 0195109384); Zhu et al., Yeast Hybrid Technologies, Eaton Publishing, (2000) (ISBN 1-881299-15-5); Fields et al., Trends Genet. 10(8):286-92 (1994); Mendelsohn et al., Curr. Opin. Biotechnol. S(5):482-6 (1994); Luban et al., Curr. Opin. Biotechnol. 6(1):59-64 (1995); Allen et al., Trends Biochem. Sci. 20(12):511-6 (1995); Drees, Curr. Opin. Chem. Biol. 3(1):64-70 (1999); Topcu et al., Pharm. Res. 17(9):1049-55 (2000); Fashena et al., Gene 250(1-2):1-14 (2000), the disclosures of which are incorporated herein by reference in their entireties. Typically, such fusion is to either E. coli LexA or yeast GAL4 DNA binding domains. Related bait plasmids are available that express the bait fused to a nuclear localization signal.

[0327] Other useful protein fusions include those that permit display of the encoded protein on the surface of a phage or cell, fusions to intrinsically fluorescent proteins, such as green fluorescent protein (GFP), and fusions to the IgG Fc region, as described above, which discussion is incorporated here by reference in its entirety.

[0328] The proteins and protein fragments of the present invention can also usefully be fused to protein toxins, such as Pseudomonas exotoxin A, diphtheria toxin, shiga toxin A, anthrax toxin lethal factor, ricin, in order to effect ablation of cells that bind or take up the proteins of the present invention.

[0329] The isolated proteins, protein fragments, and protein fusions of the present invention can be composed of natural amino acids linked by native peptide bonds, or can contain any or all of nonnatural amino acid analogues, nonnative bonds, and post-synthetic (post translational) modifications, either throughout the length of the protein or localized to one or more portions thereof.

[0330] As is well known in the art, when the isolated protein is used, e.g., for epitope mapping, the range of such nonnatural analogues, nonnative inter-residue bonds, or post-synthesis modifications will be limited to those that permit binding of the peptide to antibodies. When used as an immunogen for the preparation of antibodies in a non-human host, such as a mouse, the range of such nonnatural analogues, nonnative inter-residue bonds, or post-synthesis modifications will be limited to those that do not interfere with the immunogenicity of the protein. When the isolated protein is used as a therapeutic agent, such as a vaccine or for replacement therapy, the range of such changes will be limited to those that do not confer toxicity upon the isolated protein.

[0331] Non-natural amino acids can be incorporated during solid phase chemical synthesis or by recombinant techniques, although the former is typically more common.

[0332] Solid phase chemical synthesis of peptides is well established in the art. Procedures are described, inter alia, in Chan et al. (eds.), Fmoc Solid Phase Peptide Synthesis: A Practical Approach (Practical Approach Series), Oxford Univ. Press (March 2000) (ISBN: 0199637245); Jones, Amino Acid and Peptide Synthesis (Oxford Chemistry Primers, No 7), Oxford Univ. Press (August 1992) (ISBN: 0198556683); and Bodanszky, Principles of Peptide Synthesis (Springer Laboratory), Springer Verlag (December 1993) (ISBN: 0387564314), the disclosures of which are incorporated herein by reference in their entireties.

[0333] Non-natural amino acids can be incorporated during solid phase chemical synthesis.

[0334] For example, D-enantiomers of natural amino acids can readily be incorporated during chemical peptide synthesis: peptides assembled from D-amino acids are more resistant to proteolytic attack; incorporation of D-enantiomers can also be used to confer specific three dimensional conformations on the peptide. Other amino acid analogues commonly added during chemical synthesis include ornithine, norleucine, phosphorylated amino acids (typically phosphoserine, phosphothreonine, phosphotyrosine), L-malonyltyrosine, a non-hydrolyzable analog of phosphotyrosine (Kole et al., Biochem. Biophys. Res. Com. 209:817-821 (1995)), and various halogenated phenylalanine derivatives.

[0335] Amino acid analogues having detectable labels are also usefully incorporated during synthesis to provide a labeled polypeptide.

[0336] Biotin, for example can be added using biotinoyl—(9-fluorenylmethoxycarbonyl)-L-lysine (FMOC biocytin) (Molecular Probes, Eugene, Oreg., USA). (Biotin can also be added enzymatically by incorporation into a fusion protein of a E. coli BirA substrate peptide.)

[0337] The FMOC and tBOC derivatives of dabcyl-L-lysine (Molecular Probes, Inc., Eugene, Oreg., USA) can be used to incorporate the dabcyl chromophore at selected sites in the peptide sequence during synthesis. The aminonaphthalene derivative EDANS, the most common fluorophore for pairing with the dabcyl quencher in fluorescence resonance energy transfer (FRET) systems, can be introduced during automated synthesis of peptides by using EDANS—FMOC-L-glutamic acid or the corresponding tBOC derivative (both from Molecular Probes, Inc., Eugene, Oreg., USA). Tetramethylrhodamine fluorophores can be incorporated during automated FMOC synthesis of peptides using (FMOC)—TMR-L-lysine (Molecular Probes, Inc. Eugene, Oreg., USA).

[0338] Other useful amino acid analogues that can be incorporated during chemical synthesis include aspartic acid, glutamic acid, lysine, and tyrosine analogues having allyl side-chain protection (Applied Biosystems, Inc., Foster City, Calif., USA); the allyl side chain permits synthesis of cyclic, branched-chain, sulfonated, glycosylated, and phosphorylated peptides.

[0339] A large number of other FMOC-protected non-natural amino acid analogues capable of incorporation during chemical synthesis are available commercially, including, e.g., Fmoc-2-aminobicyclo[2.2.l]heptane-2-carboxylic acid, Fmoc-3-endo-aminobicyclo[2.2.1]heptane-2-endo-carboxylic acid, Fmoc-3-exo-aminobicyclo[2.2.1]heptane-2-exo-carboxylic acid, Fmoc-3-endo-amino-bicyclo[2.2.1]hept-5-ene-2-endo-carboxylic acid, Fmoc-3-exo-amino-bicyclo[2.2.1]hept-5-ene-2-exo-carboxylic acid, Fmoc-cis-2-amino-1-cyclohexanecarboxylic acid, Fmoc-trans-2-amino-1-cyclohexanecarboxylic acid, Fmoc-1-amino-1-cyclopentanecarboxylic acid, Fmoc-cis-2-amino-1-cyclopentanecarboxylic acid, Fmoc-1-amino-1-cyclopropanecarboxylic acid, Fmoc-D-2-amino-4-(ethylthio)butyric acid, Fmoc-L-2-amino-4-(ethylthio)butyric acid, Fmoc-L-buthionine, Fmoc-S-methyl-L-Cysteine, Fmoc-2-aminobenzoic acid (anthranillic acid), Fmoc-3-aminobenzoic acid, Fmoc-4-aminobenzoic acid, Fmoc-2-aminobenzophenone-21-carboxylic acid, Fmoc-N-(4-aminobenzoyl)-b-alanine, Fmoc-2-amino-4,5-dimethoxybenzoic acid, Fmoc-4-aminohippuric acid, Fmoc-2-amino-3-hydroxybenzoic acid, Fmoc-2-amino-5-hydroxybenzoic acid, Fmoc-3-amino-4-hydroxybenzoic acid, Fmoc-4-amino-3-hydroxybenzoic acid, Fmoc-4-amino-2-hydroxybenzoic acid, Fmoc-5-amino-2-hydroxybenzoic acid, Fmoc-2-amino-3-methoxybenzoic acid, Fmoc-4-amino-3-methoxybenzoic acid, Fmoc-2-amino-3-methylbenzoic acid, Fmoc-2-amino-5-methylbenzoic acid, Fmoc-2-amino-6-methylbenzoic acid, Fmoc-3-amino-2-methylbenzoic acid, Fmoc-3-amino-4-methylbenzoic acid, Fmoc-4-amino-3-methylbenzoic acid, Fmoc-3-amino-2-naphtoic acid, Fmoc-D,L-3-amino-3-phenylpropionic acid, Fmoc-L-Methyldopa, Fmoc-2-amino-4,6-dimethyl-3-pyridinecarboxylic acid, Fmoc-D,L-?-amino-2-thiophenacetic acid, Fmoc-4-(carboxymethyl)piperazine, Fmoc-4-carboxypiperazine, Fmoc-4-(carboxymethyl)homopiperazine, Fmoc-4-phenyl-4-piperidinecarboxylic acid, Fmoc-L-1,2,3,4-tetrahydronorharman-3-carboxylic acid, Fmoc-L-thiazolidine-4-carboxylic acid, all available from The Peptide Laboratory (Richmond, Calif., USA).

[0340] Non-natural residues can also be added biosynthetically by engineering a suppressor tRNA, typically one that recognizes the UAG stop codon, by chemical aminoacylation with the desired unnatural amino acid and. Conventional site-directed mutagenesis is used to introduce the chosen stop codon UAG at the site of interest in the protein gene. When the acylated suppressor tRNA and the mutant gene are combined in an in vitro transcription/translation system, the unnatural amino acid is incorporated in response to the UAG codon to give a protein containing that amino acid at the specified position. Liu et al., Proc. Natl Acad. Sci. USA 96(9):4780-5 (1999); Wang et al., Science 292(5516):498-500 (2001).

[0341] The isolated proteins, protein fragments and fusion proteins of the present invention can also include nonnative inter-residue bonds, including bonds that lead to circular and branched forms.

[0342] The isolated proteins and protein fragments of the present invention can also include post-translational and post-synthetic modifications, either throughout the length of the protein or localized to one or more portions thereof.

[0343] For example, when produced by recombinant expression in eukaryotic cells, the isolated proteins, fragments, and fusion proteins of the present invention will typically include N-linked and/or 0-linked glycosylation, the pattern of which will reflect both the availability of glycosylation sites on the protein sequence and the identity of the host cell. Further modification of glycosylation pattern can be performed enzymatically.

[0344] As another example, recombinant polypeptides of the invention can also include an initial modified methionine residue, in some cases resulting from host-mediated processes.

[0345] When the proteins, protein fragments, and protein fusions of the present invention are produced by chemical synthesis, post-synthetic modification can be performed before deprotection and cleavage from the resin or after deprotection and cleavage. Modification before deprotection and cleavage of the synthesized protein often allows greater control, e.g. by allowing targeting of the modifying moiety to the N-terminus of a resin-bound synthetic peptide.

[0346] Useful post-synthetic (and post-translational) modifications include conjugation to detectable labels, such as fluorophores.

[0347] A wide variety of amine-reactive and thiol-reactive fluorophore derivatives have been synthesized that react under nondenaturing conditions with N-terminal amino groups and epsilon amino groups of lysine residues, on the one hand, and with free thiol groups of cysteine residues, on the other.

[0348] Kits are available commercially that permit conjugation of proteins to a variety of amine-reactive or thiol-reactive fluorophores: Molecular Probes, Inc. (Eugene, Oreg., USA), e.g., offers kits for conjugating proteins to Alexa Fluor 350, Alexa Fluor 430, Fluorescein-EX, Alexa Fluor 488, Oregon Green 488, Alexa Fluor 532, Alexa Fluor 546, Alexa Fluor 546, Alexa Fluor 568, Alexa Fluor 594, and Texas Red-X.

[0349] A wide variety of other amine-reactive and thiol-reactive fluorophores are available commercially (Molecular Probes, Inc., Eugene, Oreg., USA), including Alexa Fluor® 350, Alexa Fluor® 488, Alexa Fluor® 532, Alexa FluorO 546, Alexa Fluor® 568, Alexa Fluor® 594, Alexa Fluor® 647 (monoclonal antibody labeling kits available from Molecular Probes, Inc., Eugene, Oreg., USA), BODIPY dyes, such as BODIPY 493/503, BODIPY FL, BODIPY R6G, BODIPY 530/550, BODIPY TMR, BODIPY 558/568, BODIPY 558/568, BODIPY 564/570, BODIPY 576/589, BODIPY 581/591, BODIPY TR, BODIPY 630/650, BODIPY 650/665, Cascade Blue, Cascade Yellow, Dansyl, lissamine rhodamine B, Marina Blue, Oregon Green 488, Oregon Green 514, Pacific Blue, rhodamine 6G, rhodamine green, rhodamine red, tetramethylrhodamine, Texas Red (available from Molecular Probes, Inc., Eugene, Oreg., USA).

[0350] The polypeptides of the present invention can also be conjugated to fluorophores, other proteins, and other macromolecules, using bifunctional linking reagents.

[0351] Common homobifunctional reagents include, e.g., APG, AEDP, BASED, BMB, BMDB, BMH, BMOE, BM[PEO]3, BM[PEO]4, BS3, BSOCOES, DFDNB, DMA, DMP, DMS, DPDPB, DSG, DSP (Lomant's Reagent), DSS, DST, DTBP, DTME, DTSSP, EGS, HBVS, Sulfo-BSOCOES, Sulfo-DST, Sulfo-EGS (all available from Pierce, Rockford, Ill., USA); common heterobifunctional cross-linkers include ABH, AMAS, ANB-NOS, APDP, ASBA, BMPA, BMPH, BMPS, EDC, EMCA, EMCH, EMCS, KMUA, KMUH, GMBS, LC-SMCC, LC-SPDP, MBS, M2C2H, MPBH, MSA, NHS-ASA, PDPH, PMPI, SADP, SAED, SAND, SANPAH, SASD, SATP, SBAP, SFAD, SIA, SIAB, SMCC, SMPB, SMPH, SMPT, SPDP, Sulfo-EMCS, Sulfo-GMBS, Sulfo-HSAB, Sulfo-KMUS, Sulfo-LC-SPDP, Sulfo-MBS, Sulfo-NHS-LC-ASA, Sulfo-SADP, Sulfo-SANPAH, Sulfo-SIAB, Sulfo-SMCC, Sulfo-SMPB, Sulfo-LC-SMPT, SVSB, TFCS (all available Pierce, Rockford, Ill., USA).

[0352] The proteins, protein fragments, and protein fusions of the present invention can be conjugated, using such cross-linking reagents, to fluorophores that are not amine- or thiol-reactive.

[0353] Other labels that usefully can be conjugated to the proteins, protein fragments, and fusion proteins of the present invention include radioactive labels, echosonographic contrast reagents, and MRI contrast agents.

[0354] The proteins, protein fragments, and protein fusions of the present invention can also usefully be conjugated using cross-linking agents to carrier proteins, such as KLH, bovine thyroglobulin, and even bovine serum albumin (BSA), to increase immunogenicity for raising anti-hGDMLP-lantibodies.

[0355] The proteins, protein fragments, and protein fusions of the present invention can also usefully be conjugated to polyethylene glycol (PEG); PEGylation increases the serum half life of proteins administered intravenously for replacement therapy. Delgado et al., Crit. Rev. Ther. Drug Carrier Syst. 9(3-4):249-304 (1992); Scott et al., Curr. Pharm. Des. 4(6):423-38 (1998); DeSantis et al., Curr. Opin. Biotechnol. 10(4):324-30 (1999), incorporated herein by reference in their entireties. PEG monomers can be attached to the protein directly or through a linker, with PEGylation using PEG monomers activated with tresyl chloride (2,2,2-trifluoroethanesulphonyl chloride) permitting direct attachment under mild conditions.

[0356] The isolated proteins of the present invention, including fusions thereof, can be produced by recombinant expression, typically using the expression vectors of the present invention as above-described or, if fewer than about 100 amino acids, by chemical synthesis (typically, solid phase synthesis), and, on occasion, by in vitro translation.

[0357] Production of the isolated proteins of the present invention can optionally be followed by purification.

[0358] Purification of recombinantly expressed proteins is now well within the skill in the art. See, e.g., Thorner et al. (eds.), Applications of Chimeric Genes and Hybrid Proteins, Part A: Gene Expression and Protein Purification (Methods in Enzymology, Volume 326), Academic Press (2000), (ISBN: 0121822273); Harbin (ed.), Cloning, Gene Expression and Protein Purification: Experimental Procedures and Process Rationale, Oxford Univ. Press (2001) (ISBN: 0195132947); Marshak et al., Strategies for Protein Purification and Characterization: A Laboratory Course Manual, Cold Spring Harbor Laboratory Press (1996) (ISBN: 0-87969-385-1); and Roe (ed.), Protein Purification Applications, Oxford University Press (2001), the disclosures of which are incorporated herein by reference in their entireties, and thus need not be detailed here.

[0359] Briefly, however, if purification tags have been fused through use of an expression vector that appends such tag, purification can be effected, at least in part, by means appropriate to the tag, such as use of immobilized metal affinity chromatography for polyhistidine tags. Other techniques common in the art include ammonium sulfate fractionation, immunoprecipitation, fast protein liquid chromatography (FPLC), high performance liquid chromatography (HPLC), and preparative gel electrophoresis.

[0360] Purification of chemically-synthesized peptides can readily be effected, e.g., by HPLC.

[0361] Accordingly, it is an aspect of the present invention to provide the isolated proteins of the present invention in pure or substantially pure form.

[0362] A purified protein of the present invention is an isolated protein, as above described, that is present at a concentration of at least 95%, as measured on a mass basis (w/w) with respect to total protein in a composition. Such purities can often be obtained during chemical synthesis without further purification, as, e.g., by HPLC. Purified proteins of the present invention can be present at a concentration (measured on a mass basis with respect to total protein in a composition) of 96%, 97%, 98%, and even 99%. The proteins of the present invention can even be present at levels of 99.5%, 99.6%, and even 99.7%, 99.8%, or even 99.9% following purification, as by HPLC.

[0363] Although high levels of purity are preferred when the isolated proteins of the present invention are used as therapeutic agents—such as vaccines, or for replacement therapy—the isolated proteins of the present invention are also useful at lower purity. For example, partially purified proteins of the present invention can be used as immunogens to raise antibodies in laboratory animals.

[0364] Thus, in another aspect, the present invention provides the isolated proteins of the present invention in substantially purified form. A “substantially purified protein” of the present invention is an isolated protein, as above described, present at a concentration of at least 70%, measured on a mass basis with respect to total protein in a composition. Usefully, the substantially purified protein is present at a concentration, measured on a mass basis with respect to total protein in a composition, of at least 75%, 80%, or even at least 85%, 90%, 91%, 92%, 93%, 94%, 94.5% or even at least 94.9%.

[0365] In preferred embodiments, the purified and substantially purified proteins of the present invention are in compositions that lack detectable ampholytes, acrylamide monomers, bis-acrylamide monomers, and polyacrylamide.

[0366] The proteins, fragments, and fusions of the present invention can usefully be attached to a substrate. The substrate can porous or solid, planar or non-planar; the bond can be covalent or noncovalent.

[0367] For example, the proteins, fragments, and fusions of the present invention can usefully be bound to a porous substrate, commonly a membrane, typically comprising nitrocellulose, polyvinylidene fluoride (PVDF), or cationically derivatized, hydrophilic PVDF; so bound, the proteins, fragments, and fusions of the present invention can be used to detect and quantify antibodies, e.g. in serum, that bind specifically to the immobilized protein of the present invention.

[0368] As another example, the proteins, fragments, and fusions of the present invention can usefully be bound to a substantially nonporous substrate, such as plastic, to detect and quantify antibodies, e.g. in serum, that bind specifically to the immobilized protein of the present invention. Such plastics include polymethylacrylic, polyethylene, polypropylene, polyacrylate, polymethylmethacrylate, polyvinylchloride, polytetrafluoroethylene, polystyrene, polycarbonate, polyacetal, polysulfone, celluloseacetate, cellulosenitrate, nitrocellulose, or mixtures thereof; when the assay is performed in standard microtiter dish, the plastic is typically polystyrene.

[0369] The proteins, fragments, and fusions of the present invention can also be attached to a substrate suitable for use as a surface enhanced laser desorption ionization source; so attached, the protein, fragment, or fusion of the present invention is useful for binding and then detecting secondary proteins that bind with sufficient affinity or avidity to the surface-bound protein to indicate biologic interaction therebetween. The proteins, fragments, and fusions of the present invention can also be attached to a substrate suitable for use in surface plasmon resonance detection; so attached, the protein, fragment, or fusion of the present invention is useful for binding and then detecting secondary proteins that bind with sufficient affinity or avidity to the surface-bound protein to indicate biological interaction therebetween.

[0370] Antibodies and Antibody-producing Cells

[0371] In another aspect, the invention provides antibodies, including fragments and derivatives thereof, that bind specifically to hGDMLP-1 proteins and protein fragments of the present invention, or that bind to one or more of the proteins and protein fragments encoded by the isolated hGDMLP-1 nucleic acids of the present invention. The antibodies of the present invention can be specific for linear epitopes, discontinuous epitopes, or conformational epitopes of such proteins or protein fragments, either as present on the protein in its native conformation or, in some cases, as present on the proteins as denatured, as, e.g., by solubilization in SDS.

[0372] In other embodiments, the invention provides antibodies, including fragments and derivatives thereof, the binding of which can be competitively inhibited by one or more of the hGDMLP-1 proteins and protein fragments of the present invention, or by one or more of the proteins and protein fragments encoded by the isolated hGDMLP-1 nucleic acids of the present invention.

[0373] As used herein, the term “antibody” refers to a polypeptide, at least a portion of which is encoded by at least one immunoglobulin gene, which can bind specifically to a first molecular species, and to fragments or derivatives thereof that remain capable of such specific binding.

[0374] By “bind specifically” and “specific binding” is here intended the ability of the antibody to bind to a first molecular species in preference to binding to other molecular species with which the antibody and first molecular species are admixed. An antibody is said specifically to “recognize” a first molecular species when it can bind specifically to that first molecular species.

[0375] As is well known in the art, the degree to which an antibody can discriminate as among molecular species in a mixture will depend, in part, upon the conformational relatedness of the species in the mixture; typically, the antibodies of the present invention will discriminate over adventitious binding to non-hGDMLP-1 proteins by at least two-fold, more typically by at least 5-fold, typically by more than 10-fold, 25-fold, 50-fold, 75-fold, and often by more than 100-fold, and on occasion by more than 500-fold or 1000-fold. When used to detect the proteins or protein fragments of the present invention, the antibody of the present invention is sufficiently specific when it can be used to determine the presence of the protein of the present invention in samples derived from human heart or skeletal muscle.

[0376] Typically, the affinity or avidity of an antibody (or antibody multimer, as in the case of an IgM pentamer) of the present invention for a protein or protein fragment of the present invention will be at least about 1×10⁻⁶ molar (M), typically at least about 5×10⁻⁷ M, usefully at least about 1×10⁻⁷ M, with affinities and avidities of at least 1×10⁻⁸ M, 5×10⁻⁹ M, and 1×10⁻¹⁰ M proving especially useful.

[0377] The antibodies of the present invention can be naturally-occurring forms, such as IgG, IgM, IgD, IgE, and IgA, from any mammalian species.

[0378] Human antibodies can, but will infrequently, be drawn directly from human donors or human cells. In such case, antibodies to the proteins of the present invention will typically have resulted from fortuitous immunization, such as autoimmune immunization, with the protein or protein fragments of the present invention. Such antibodies will typically, but will not invariably, be polyclonal.

[0379] Human antibodies are more frequently obtained using transgenic animals that express human immunoglobulin genes, which transgenic animals can be affirmatively immunized with the protein immunogen of the present invention. Human Ig-transgenic mice capable of producing human antibodies and methods of producing human antibodies therefrom upon specific immunization are described, inter alia, in U.S. Pat. Nos. 6,162,963; 6,150,584; 6,114,598; 6,075,181; 5,939,598; 5,877,397; 5,874,299; 5,814,318; 5,789,650; 5,770,429; 5,661,016; 5,633,425; 5,625,126; 5,569,825; 5,545,807; 5,545,806, and 5,591,669, the disclosures of which are incorporated herein by reference in their entireties. Such antibodies are typically monoclonal, and are typically produced using techniques developed for production of murine antibodies.

[0380] Human antibodies are particularly useful, and often preferred, when the antibodies of the present invention are to be administered to human beings as in vivo diagnostic or therapeutic agents, since recipient immune response to the administered antibody will often be substantially less than that occasioned by administration of an antibody derived from another species, such as mouse.

[0381] IgG, IgM, IgD, IgE and IgA antibodies of the present invention are also usefully obtained from other mammalian species, including rodents typically mouse, but also rat, guinea pig, and hamster—lagomorphs, typically rabbits, and also larger mammals, such as sheep, goats, cows, and horses. In such cases, as with the transgenic human-antibody-producing non-human mammals, fortuitous immunization is not required, and the non-human mammal is typically affirmatively immunized, according to standard immunization protocols, with the protein or protein fragment of the present invention.

[0382] As discussed above, virtually all fragments of 8 or more contiguous amino acids of the proteins of the present invention can be used effectively as immunogens when conjugated to a carrier, typically a protein such as bovine thyroglobulin, keyhole limpet hemocyanin, or bovine serum albumin, conveniently using a bifunctional linker such as those described elsewhere above, which discussion is incorporated by reference here.

[0383] Immunogenicity can also be conferred by fusion of the proteins and protein fragments of the present invention to other moieties.

[0384] For example, peptides of the present invention can be produced by solid phase synthesis on a branched polylysine core matrix; these multiple antigenic peptides (MAPs) provide high purity, increased avidity, accurate chemical definition and improved safety in vaccine development. Tam et al., Proc. Natl. Acad. Sci. USA 85:5409-5413 (1988); Posnett et al., J. Biol. Chem. 263, 1719-1725 (1988).

[0385] Protocols for immunizing non-human mammals are well-established in the art, Harlow et al. (eds.), Antibodies: A Laboratory Manual, Cold Spring Harbor Laboratory (1998) (ISBN: 0879693142); Coligan et al. (eds.), Current Protocols in Immunology, John Wiley & Sons, Inc. (2001) (ISBN: 0-471-52276-7); Zola, Monoclonal Antibodies: Preparation and Use of Monoclonal Antibodies and Enqineered Antibody Derivatives (Basics: From Backqround to Bench), Springer Verlag (2000) (ISBN: 0387915907), the disclosures of which are incorporated herein by reference, and often include multiple immunizations, either with or without adjuvants such as Freund's complete adjuvant and Freund's incomplete adjuvant.

[0386] Antibodies from nonhuman mammals can be polyclonal or monoclonal, with polyclonal antibodies having certain advantages in immunohistochemical detection of the proteins of the present invention and monoclonal antibodies having advantages in identifying and distinguishing particular epitopes of the proteins of the present invention.

[0387] Following immunization, the antibodies of the present invention can be produced using any art-accepted technique. Such techniques are well known in the art, Coligan et al. (eds.), Current Protocols in Immunology, John Wiley & Sons, Inc. (2001) (ISBN: 0-471-52276-7); Zola, Monoclonal Antibodies: Preparation and Use of Monoclonal Antibodies and Engineered Antibody Derivatives (Basics: From Background to Bench), Springer Verlag (2000) (ISBN: 0387915907); Howard et al. (eds.), Basic Methods in Antibody Production and Characterization, CRC Press (2000) (ISBN: 0849394457); Harlow et al. (eds.), Antibodies: A Laboratory Manual, Cold Spring Harbor Laboratory (1998) (ISBN: 0879693142); Davis (ed.), Monoclonal Antibody Protocols, Vol. 45, Humana Press (1995) (ISBN: 0896033082); Delves (ed.), Antibody Production: Essential Techniques, John Wiley & Son Ltd (1997) (ISBN: 0471970107); Kenney, Antibody Solution: An Antibody Methods Manual, Chapman & Hall (1997) (ISBN: 0412141914), incorporated herein by reference in their entireties, and thus need not be detailed here.

[0388] Briefly, however, such techniques include, inter alia, production of monoclonal antibodies by hybridomas and expression of antibodies or fragments or derivatives thereof from host cells engineered to express immunoglobulin genes or fragments thereof. These two methods of production are not mutually exclusive: genes encoding antibodies specific for the proteins or protein fragments of the present invention can be cloned from hybridomas and thereafter expressed in other host cells. Nor need the two necessarily be performed together: e.g., genes encoding antibodies specific for the proteins and protein fragments of the present invention can be cloned directly from B cells known to be specific for the desired protein, as further described in U.S. Pat. No. 5,627,052, the disclosure of which is incorporated herein by reference in its entirety, or from antibody-displaying phage.

[0389] Recombinant expression in host cells is particularly useful when fragments or derivatives of the antibodies of the present invention are desired.

[0390] Host cells for recombinant antibody production—either whole antibodies, antibody fragments, or antibody derivatives—can be prokaryotic or eukaryotic.

[0391] Prokaryotic hosts are particularly useful for producing phage displayed antibodies of the present invention.

[0392] The technology of phage-displayed antibodies, in which antibody variable region fragments are fused, for example, to the gene III protein (pIII) or gene VIII protein (PVIII) for display on the surface of filamentous phage, such as M13, is by now well-established, Sidhu, Curr. Opin. Biotechnol. 11(6):610-6 (2000); Griffiths et al., Curr. Opin. Biotechnol. 9(1):102-8 (1998); Hoogenboom et al., Immunotechnology, 4(l):1-20 (1998); Rader et al., Current Opinion in Biotechnology 8:503-508 (1997); Aujame et al., Human Antibodies 8:155-168 (1997); Hoogenboom, Trends in Biotechnol. 15:62-70 (1997); de Kruif et al., 17:453-455 (1996); Barbas et al., Trends in Biotechnol. 14:230-234 (1996); Winter et al., Ann. Rev. Immunol. 433-455 (1994), and techniques and protocols required to generate, propagate, screen (pan), and use the antibody fragments from such libraries have recently been compiled, Barbas et al., Phage Display: A Laboratory Manual, Cold Spring Harbor Laboratory Press (2001) (ISBN 0-87969-546-3); Kay et al. (eds.), Phage Display of Peptides and Proteins: A Laboratory Manual, Academic Press, Inc. (1996); Abelson et al. (eds.), Combinatorial Chemistry, Methods in Enzymology vol. 267, Academic Press (May 1996), the disclosures of which are incorporated herein by reference in their entireties.

[0393] Typically, phage-displayed antibody fragments are scFv fragments or Fab fragments; when desired, full length antibodies can be produced by cloning the variable regions from the displaying phage into a complete antibody and expressing the full length antibody in a further prokaryotic or a eukaryotic host cell.

[0394] Eukaryotic cells are also useful for expression of the antibodies, antibody fragments, and antibody derivatives of the present invention.

[0395] For example, antibody fragments of the present invention can be produced in Pichia pastoris, Takahashi et al., Biosci. Biotechnol. Biochem. 64(10):2138-44 (2000); Freyre et al., J. Biotechnol. 76(2-3):157-63 (2000); Fischer et al., Biotechnol. Appl. Biochem. 30 (Pt 2):117-20 (1999); Pennell et al., Res. Immunol. 149(6):599-603 (1998); Eldin et al., J. Immunol. Methods. 201(1):67-75 (1997); and in Saccharomyces cerevisiae, Frenken et al., Res. Immunol. 149(6):589-99 (1998); Shusta et al., Nature Biotechnol. 16(8):773-7 (1998), the disclosures of which are incorporated herein by reference in their entireties.

[0396] Antibodies, including antibody fragments and derivatives, of the present invention can also be produced in insect cells, Li et al., Protein Expr. Purif. 21(1):121-8 (2001); Ailor et al., Biotechnol. Bioeng. 58(2-3):196-203 (1998); Hsu et al., Biotechnol. Prog. 13(1):96-104 (1997); Edelman et al., Immunology 91(1):13-9 (1997); and Nesbit et al., J. Immunol. Methods. 151(1-2):201-8 (1992), the disclosures of which are incorporated herein by reference in their entireties.

[0397] Antibodies and fragments and derivatives thereof of the present invention can also be produced in plant cells, Giddings et al., Nature Biotechnol. 18(11):1151-5 (2000); Gavilondo et al., Biotechniques 29(1):128-38 (2000); Fischer et al., J. Biol. Regul. Homeost. Agents 14(2):83-92 (2000); Fischer et al., Biotechnol. Appl. Biochem. 30 (Pt 2):113-6 (1999); Fischer et al., Biol. Chem. 380(7-8):825-39 (1999); Russell, Curr. Top. Microbiol. Immunol. 240:119-38 (1999); and Ma et al., Plant Physiol. 109(2):341-6 (1995), the disclosures of which are incorporated herein by reference in their entireties.

[0398] Mammalian cells useful for recombinant expression of antibodies, antibody fragments, and antibody derivatives of the present invention include CHO cells, COS cells, 293 cells, and myeloma cells.

[0399] Verma et al., J. Immunol. Methods 216(1-2):165-81 (1998), review and compare bacterial, yeast, insect and mammalian expression systems for expression of antibodies.

[0400] Antibodies of the present invention can also be prepared by cell free translation, as further described in Merk et al., J. Biochem. (Tokyo). 125(2):328-33 (1999) and Ryabova et al., Nature Biotechnol. 15(1):79-84 (1997), and in the milk of transgenic animals, as further described in Pollock et al., J. Immunol. Methods 231(1-2):147-57 (1999), the disclosures of which are incorporated herein by reference in their entireties.

[0401] The invention further provides antibody fragments that bind specifically to one or more of the proteins and protein fragments of the present invention, to one or more of the proteins and protein fragments encoded by the isolated nucleic acids of the present invention, or the binding of which can be competitively inhibited by one or more of the proteins and protein fragments of the present invention or one or more of the proteins and protein fragments encoded by the isolated nucleic acids of the present invention.

[0402] Among such useful fragments are Fab, Fab′, Fv, F(ab)′₂, and single chain Fv (scFv) fragments. Other useful fragments are described in Hudson, Curr. Opin. Biotechnol. 9(4):395-402 (1998).

[0403] It is also an aspect of the present invention to provide antibody derivatives that bind specifically to one or more of the proteins and protein fragments of the present invention, to one or more of the proteins and protein fragments encoded by the isolated nucleic acids of the present invention, or the binding of which can be competitively inhibited by one or more of the proteins and protein fragments of the present invention or one or more of the proteins and protein fragments encoded by the isolated nucleic acids of the present invention.

[0404] Among such useful derivatives are chimeric, primatized, and humanized antibodies; such derivatives are less immunogenic in human beings, and thus more suitable for in vivo administration, than are unmodified antibodies from non-human mammalian species.

[0405] Chimeric antibodies typically include heavy and/or light chain variable regions (including both CDR and framework residues) of immunoglobulins of one species, typically mouse, fused to constant regions of another species, typically human. See, e.g., U.S. Pat. No. 5,807,715; Morrison et al., Proc. Natl. Acad. Sci USA. 81(21):6851-5 (1984); Sharon et al., Nature 309(5966):364-7 (1984); Takeda et al., Nature 314(6010):452-4 (1985), the disclosures of which are incorporated herein by reference in their entireties. Primatized and humanized antibodies typically include heavy and/or light chain CDRs from a murine antibody grafted into a non-human primate or human antibody V region framework, usually further comprising a human constant region, Riechmann et al., Nature 332(6162):323-7 (1988); Co et al., Nature 351(6326):501-2 (1991); U.S. Pat. Nos. 6,054,297; 5,821,337; 5,770,196; 5,766,886; 5,821,123; 5,869,619; 6,180,377; 6,013,256; 5,693,761; and 6,180,370, the disclosures of which are incorporated herein by reference in their entireties.

[0406] Other useful antibody derivatives of the invention include heteromeric antibody complexes and antibody fusions, such as diabodies (bispecific antibodies), single-chain diabodies, and intrabodies.

[0407] The antibodies of the present invention, including fragments and derivatives thereof, can usefully be labeled. It is, therefore, another aspect of the present invention to provide labeled antibodies that bind specifically to one or more of the proteins and protein fragments of the present invention, to one or more of the proteins and protein fragments encoded by the isolated nucleic acids of the present invention, or the binding of which can be competitively inhibited by one or more of the proteins and protein fragments of the present invention or one or more of the proteins and protein fragments encoded by the isolated nucleic acids of the present invention.

[0408] The choice of label depends, in part, upon the desired use.

[0409] For example, when the antibodies of the present invention are used for immunohistochemical staining of tissue samples, the label can usefully be an enzyme that catalyzes production and local deposition of a detectable product.

[0410] Enzymes typically conjugated to antibodies to permit their immunohistochemical visualization are well known, and include alkaline phosphatase, β-galactosidase, glucose oxidase, horseradish peroxidase (HRP), and urease. Typical substrates for production and deposition of visually detectable products include o-nitrophenyl-beta-D-galactopyranoside (ONPG); o-phenylenediamine dihydrochloride (OPD); p-nitrophenyl phosphate (PNPP); p-nitrophenyl-beta-D-galactopryanoside (PNPG); 31,3′-diaminobenzidine (DAB); 3-amino-9-ethylcarbazole (AEC); 4-chloro-1-naphthol (CN); 5-bromo-4-chloro-3-indolyl-phosphate (BCIP); ABTS®; BluoGal; iodonitrotetrazolium (INT); nitroblue tetrazolium chloride (NBT); phenazine methosulfate (PMS); phenolphthalein monophosphate (PMP); tetramethyl benzidine (TMB); tetranitroblue tetrazolium (TNBT); X-Gal; X-Gluc; and X-Glucoside.

[0411] Other substrates can be used to produce products for local deposition that are luminescent. For example, in the presence of hydrogen peroxide (H₂O₂), horseradish peroxidase (HRP) can catalyze the oxidation of cyclic diacylhydrazides, such as luminol. Immediately following the oxidation, the luminol is in an excited state (intermediate reaction product), which decays to the ground state by emitting light. Strong enhancement of the light emission is produced by enhancers, such as phenolic compounds. Advantages include high sensitivity, high resolution, and rapid detection without radioactivity and requiring only small amounts of antibody. See, e.g., Thorpe et al., Methods Enzymol. 133:331-53 (1986); Kricka et al., J. Immunoassay 17(1):67-83 (1996); and Lundqvist et al., J. Biolumin. Chemilumin. 10(6):353-9 (1995), the disclosures of which are incorporated herein by reference in their entireties. Kits for such enhanced chemiluminescent detection (ECL) are available commercially.

[0412] The antibodies can also be labeled using colloidal gold.

[0413] As another example, when the antibodies of the present invention are used, e.g., for flow cytometric detection, for scanning laser cytometric detection, or for fluorescent immunoassay, they can usefully be labeled with fluorophores.

[0414] There are a wide variety of fluorophore labels that can usefully be attached to the antibodies of the present invention.

[0415] For flow cytometric applications, both for extracellular detection and for intracellular detection, common useful fluorophores can be fluorescein isothiocyanate (FITC), allophycocyanin (APC), R-phycoerythrin (PE), peridinin chlorophyll protein (PerCP), Texas Red, Cy3, Cy5, fluorescence resonance energy tandem fluorophores such as PerCP-Cy5.5, PE-Cy5, PE-Cy5.5, PE-Cy7, PE-Texas Red, and APC-Cy7.

[0416] Other fluorophores include, inter alia, Alexa Fluor® 350, Alexa Fluor® 488, Alexa Fluor® 532, Alexa Fluor® 546, Alexa Fluor® 568, Alexa Fluor® 594, Alexa Fluor® 647 (monoclonal antibody labeling kits available from Molecular Probes, Inc., Eugene, Oreg., USA), BODIPY dyes, such as BODIPY 493/503, BODIPY FL, BODIPY R6G, BODIPY 530/550, BODIPY TMR, BODIPY 558/568, BODIPY 558/568, BODIPY 564/570, BODIPY 576/589, BODIPY 581/591, BODIPY TR, BODIPY 630/650, BODIPY 650/665, Cascade Blue, Cascade Yellow, Dansyl, lissamine rhodamine B, Marina Blue, Oregon Green 488, Oregon Green 514, Pacific Blue, rhodamine 6G, rhodamine green, rhodamine red, tetramethylrhodamine, Texas Red (available from Molecular Probes, Inc., Eugene, Oreg., USA), and Cy2, Cy3, Cy3.5, Cy5, Cy5.5, Cy7, all of which are also useful for fluorescently labeling the antibodies of the present invention.

[0417] For secondary detection using labeled avidin, streptavidin, captavidin or neutravidin, the antibodies of the present invention can usefully be labeled with biotin.

[0418] When the antibodies of the present invention are used, e.g., for western blotting applications, they can usefully be labeled with radioisotopes, such as ³³P, ³²P, ³⁵S, ³H, and ¹²⁵I.

[0419] As another example, when the antibodies of the present invention are used for radioimmunotherapy, the label can usefully be ²²⁸Th, ²²⁷Ac, ²²⁵Ac ²²³Ra, ²¹³Bi, ²¹² Pb, ²¹²Bi, ²¹¹At, ²⁰³Pb, ¹⁹⁴Os, ¹⁸⁸Re, ¹⁸⁶Re, ¹⁵³Sm, ¹⁴⁹Tb, ¹³¹I, ¹²⁵I, ¹¹¹In, ¹⁰⁵Rh, ^{99m}Tc, ⁹⁷Ru, ⁹⁰Y, ⁹⁰Sr, ⁸⁸Y, ⁷²Se, ⁶⁷Cu, or ⁴⁷Sc.

[0420] As another example, when the antibodies of the present invention are to be used for in vivo diagnostic use, they can be rendered detectable by conjugation to MRI contrast agents, such as gadolinium diethylenetriaminepentaacetic acid (DTPA), Lauffer et al., Radiology 207(2):529-38 (1998), or by radioisotopic labeling.

[0421] As would be understood, use of the labels described above is not restricted to the application as for which they were mentioned.

[0422] The antibodies of the present invention, including fragments and derivatives thereof, can also be conjugated to toxins, in order to target the toxin's ablative action to cells that display and/or express the proteins of the present invention. Commonly, the antibody in such immunotoxins is conjugated to Pseudomonas exotoxin A, diphtheria toxin, shiga toxin A, anthrax toxin lethal factor, or ricin. See Hall (ed.), Immunotoxin Methods and Protocols (Methods in Molecular Biology, Vol 166), Humana Press (2000) (ISBN:0896037754); and Frankel et al. (eds.), Clinical Applications of Immunotoxins, Springer-Verlag New York, Incorporated (1998) (ISBN:3540640975), the disclosures of which are incorporated herein by reference in their entireties, for review.

[0423] The antibodies of the present invention can usefully be attached to a substrate, and it is, therefore, another aspect of the invention to provide antibodies that bind specifically to one or more of the proteins and protein fragments of the present invention, to one or more of the proteins and protein fragments encoded by the isolated nucleic acids of the present invention, or the binding of which can be competitively inhibited by one or more of the proteins and protein fragments of the present invention or one or more of the proteins and protein fragments encoded by the isolated nucleic acids of the present invention, attached to a substrate.

[0424] Substrates can be porous or nonporous, planar or nonplanar.

[0425] For example, the antibodies of the present invention can usefully be conjugated to filtration media, such as NHS-activated Sepharose or CNBr-activated Sepharose for purposes of immunoaffinity chromatography.

[0426] For example, the antibodies of the present invention can usefully be attached to paramagnetic microspheres, typically by biotin-streptavidin interaction, which microsphere can then be used for isolation of cells that express or display the proteins of the present invention. As another example, the antibodies of the present invention can usefully be attached to the surface of a microtiter plate for ELISA.

[0427] As noted above, the antibodies of the present invention can be produced in prokaryotic and eukaryotic cells. It is, therefore, another aspect of the present invention to provide cells that express the antibodies of the present invention, including hybridoma cells, B cells, plasma cells, and host cells recombinantly modified to express the antibodies of the present invention.

[0428] In yet a further aspect, the present invention provides aptamers evolved to bind specifically to one or more of the proteins and protein fragments of the present invention, to one or more of the proteins and protein fragments encoded by the isolated nucleic acids of the present invention, or the binding of which can be competitively inhibited by one or more of the proteins and protein fragments of the present invention or one or more of the proteins and protein fragments encoded by the isolated nucleic acids of the present invention.

[0429] Pharmaceutical Compositions

[0430] hGDMLP-1 is important to the proper functioning of skeletal and cardiac muscle cells; defects in hGDMLP-1 expression, activity, expression, activity, distribution, localization, and/or solubility are a cause of human disease, which disease can manifest as a disorder of heart and/or skeletal muscle function.

[0431] Accordingly, pharmaceutical compositions comprising nucleic acids, proteins, and antibodies of the present invention, as well as mimetics, agonists, antagonists, or inhibitors of hGDMLP-1 activity, can be administered as therapeutics for treatment of hGDMLP-1 defects.

[0432] Thus, in another aspect, the invention provides pharmaceutical compositions comprising the nucleic acids, nucleic acid fragments, proteins, protein fusions, protein fragments, antibodies, antibody derivatives, antibody fragments, mimetics, agonists, antagonists, and inhibitors of the present invention.

[0433] Such a composition typically contains from about 0.1 to 90% by weight of a therapeutic agent of the invention formulated in and/or with a pharmaceutically acceptable carrier or excipient.

[0434] Pharmaceutical formulation is a well-established art, and is further described in Gennaro (ed.), Remington: The Science and Practice of Pharmacy, 20^{th} ed., Lippincott, Williams & Wilkins (2000) (ISBN: 0683306472); Ansel et al., Pharmaceutical Dosage Forms and Drug Delivery Systems, 7^{th} ed., Lippincott Williams & Wilkins Publishers (1999) (ISBN: 0683305727); and Kibbe (ed.), Handbook of Pharmaceutical Excipients American Pharmaceutical Association, 3^{rd} ed. (2000) (ISBN: 091733096X), the disclosures of which are incorporated herein by reference in their entireties, and thus need not be described in detail herein.

[0435] Briefly, however, formulation of the pharmaceutical compositions of the present invention will depend upon the route chosen for administration. The pharmaceutical compositions utilized in this invention can be administered by various routes including both enteral and parenteral routes, including oral, intravenous, intramuscular, subcutaneous, inhalation, topical, sublingual, rectal, intra-arterial, intramedullary, intrathecal, intraventricular, transmucosal, transdermal, intranasal, intraperitoneal, intrapulmonary, and intrauterine.

[0436] Oral dosage forms can be formulated as tablets, pills, dragees, capsules, liquids, gels, syrups, slurries, suspensions, and the like, for ingestion by the patient.

[0437] Solid formulations of the compositions for oral administration can contain suitable carriers or excipients, such as carbohydrate or protein fillers, such as sugars, including lactose, sucrose, mannitol, or sorbitol; starch from corn, wheat, rice, potato, or other plants; cellulose, such as methyl cellulose, hydroxypropylmethyl-cellulose, sodium carboxymethylcellulose, or microcrystalline cellulose; gums including arabic and tragacanth; proteins such as gelatin and collagen; inorganics, such as kaolin, calcium carbonate, dicalcium phosphate, sodium chloride; and other agents such as acacia and alginic acid.

[0438] Agents that facilitate disintegration and/or solubilization can be added, such as the cross-linked polyvinyl pyrrolidone, agar, alginic acid, or a salt thereof, such as sodium alginate, microcrystalline cellulose, corn starch, sodium starch glycolate, and alginic acid.

[0439] Tablet binders that can be used include acacia, methylcellulose, sodium carboxymethylcellulose, polyvinylpyrrolidone (Povidone™), hydroxypropyl methylcellulose, sucrose, starch and ethylcellulose.

[0440] Lubricants that can be used include magnesium stearates, stearic acid, silicone fluid, talc, waxes, oils, and colloidal silica.

[0441] Fillers, agents that facilitate disintegration and/or solubilization, tablet binders and lubricants, including the aforementioned, can be used singly or in combination.

[0442] Solid oral dosage forms need not be uniform throughout.

[0443] For example, dragee cores can be used in conjunction with suitable coatings, such as concentrated sugar solutions, which can also contain gum arabic, talc, polyvinylpyrrolidone, carbopol gel, polyethylene glycol, and/or titanium dioxide, lacquer solutions, and suitable organic solvents or solvent mixtures.

[0444] Oral dosage forms of the present invention include push-fit capsules made of gelatin, as well as soft, sealed capsules made of gelatin and a coating, such as glycerol or sorbitol. Push-fit capsules can contain active ingredients mixed with a filler or binders, such as lactose or starches, lubricants, such as talc or magnesium stearate, and, optionally, stabilizers. In soft capsules, the active compounds can be dissolved or suspended in suitable liquids, such as fatty oils, liquid, or liquid polyethylene glycol with or without stabilizers.

[0445] Additionally, dyestuffs or pigments can be added to the tablets or dragee coatings for product identification or to characterize the quantity of active compound, i.e., dosage.

[0446] Liquid formulations of the pharmaceutical compositions for oral (enteral) administration are prepared in water or other aqueous vehicles and can contain various suspending agents such as methylcellulose, alginates, tragacanth, pectin, kelgin, carrageenan, acacia, polyvinylpyrrolidone, and polyvinyl alcohol. The liquid formulations can also include solutions, emulsions, syrups and elixirs containing, together with the active compound(s), wetting agents, sweeteners, and coloring and flavoring agents.

[0447] The pharmaceutical compositions of the present invention can also be formulated for parenteral administration.

[0448] For intravenous injection, water soluble versions of the compounds of the present invention are formulated in, or if provided as a lyophilate, mixed with, a physiologically acceptable fluid vehicle, such as 5% dextrose (“ID5”), physiologically buffered saline, 0.9% saline, Hanks' solution, or Ringer's solution.

[0449] Intramuscular preparations, e.g. a sterile formulation of a suitable soluble salt form of the compounds of the present invention, can be dissolved and administered in a pharmaceutical excipient such as Water-for-Injection, 0.9% saline, or 5% glucose solution. Alternatively, a suitable insoluble form of the compound can be prepared and administered as a suspension in an aqueous base or a pharmaceutically acceptable oil base, such as an ester of a long chain fatty acid (e.g., ethyl oleate), fatty oils such as sesame oil, triglycerides, or liposomes.

[0450] Parenteral formulations of the compositions can contain various carriers such as vegetable oils, dimethylacetamide, dimethylformamide, ethyl lactate, ethyl carbonate, isopropyl myristate, ethanol, polyols (glycerol, propylene glycol, liquid polyethylene glycol, and the like).

[0451] Aqueous injection suspensions can also contain substances that increase the viscosity of the suspension, such as sodium carboxymethyl cellulose, sorbitol, or dextran. Non-lipid polycationic amino polymers can also be used for delivery. Optionally, the suspension can also contain suitable stabilizers or agents that increase the solubility of the compounds to allow for the preparation of highly concentrated solutions.

[0452] Pharmaceutical compositions of the present invention can also be formulated to permit injectable, long-term, deposition.

[0453] The pharmaceutical compositions of the present invention can be administered topically.

[0454] A topical semi-solid ointment formulation typically contains a concentration of the active ingredient from about 1 to 20%, e.g., 5 to 10%, in a carrier such as a pharmaceutical cream base. Various formulations for topical use include drops, tinctures, lotions, creams, solutions, and ointments containing the active ingredient and various supports and vehicles. In other transdermal formulations, typically in patch-delivered formulations, the pharmaceutically active compound is formulated with one or more skin penetrants, such as 2-N-methyl-pyrrolidone (NMP) or Azone.

[0455] Inhalation formulations can also readily be formulated. For inhalation, various powder and liquid formulations can be prepared.

[0456] The pharmaceutically active compound in the pharmaceutical compositions of the present inention can be provided as the salt of a variety of acids, including but not limited to hydrochloric, sulfuric, acetic, lactic, tartaric, malic, and succinic acid. Salts tend to be more soluble in aqueous or other protonic solvents than are the corresponding free base forms.

[0457] After pharmaceutical compositions have been prepared, they are packaged in an appropriate container and labeled for treatment of an indicated condition.

[0458] The active compound will be present in an amount effective to achieve the intended purpose. The determination of an effective dose is well within the capability of those skilled in the art.

[0459] A “therapeutically effective dose” refers to that amount of active ingredient—for example hGDMLP-1 protein, fusion protein, or fragments thereof, antibodies specific for hGDMLP-1, agonists, antagonists or inhibitors of hGDMLP-1—which ameliorates the signs or symptoms of the disease or prevents progression thereof; as would be understood in the medical arts, cure, although desired, is not required.

[0460] The therapeutically effective dose of the pharmaceutical agents of the present invention can be estimated initially by in vitro tests, such as cell culture assays, followed by assay in model animals, usually mice, rats, rabbits, dogs, or pigs. The animal model can also be used to determine an initial preferred concentration range and route of administration.

[0461] For example, the ED50 (the dose therapeutically effective in 50% of the population) and LD50 (the dose lethal to 50% of the population) can be determined in one or more cell culture of animal model systems. The dose ratio of toxic to therapeutic effects is the therapeutic index, which can be expressed as LD50/ED50. Pharmaceutical compositions that exhibit large therapeutic indices are preferred.

[0462] The data obtained from cell culture assays and animal studies is used in formulating an initial dosage range for human use, and preferably provides a range of circulating concentrations that includes the ED50 with little or no toxicity. After administration, or between successive administrations, the circulating concentration of active agent varies within this range depending upon pharmacokinetic factors well known in the art, such as the dosage form employed, sensitivity of the patient, and the route of administration.

[0463] The exact dosage will be determined by the practitioner, in light of factors specific to the subject requiring treatment. Factors that can be taken into account by the practitioner include the severity of the disease state, general health of the subject, age, weight, gender of the subject, diet, time and frequency of administration, drug combination(s), reaction sensitivities, and tolerance/response to therapy. Long-acting pharmaceutical compositions can be administered every 3 to 4 days, every week, or once every two weeks depending on half-life and clearance rate of the particular formulation.

[0464] Normal dosage amounts may vary from 0.1 to 100,000 micrograms, up to a total dose of about 1 g, depending upon the route of administration. Where the therapeutic agent is a protein or antibody of the present invention, the therapeutic protein or antibody agent typically is administered at a daily dosage of 0.01 mg to 30 mg/kg of body weight of the patient (e.g., 1 mg/kg to 5 mg/kg). The pharmaceutical formulation can be administered in multiple doses per day, if desired, to achieve the total desired daily dose.

[0465] Guidance as to particular dosages and methods of delivery is provided in the literature and generally available to practitioners in the art. Those skilled in the art will employ different formulations for nucleotides than for proteins or their inhibitors. Similarly, delivery of polynucleotides or polypeptides will be specific to particular cells, conditions, locations, etc.

[0466] Conventional methods, known to those of ordinary skill in the art of medicine, can be used to administer the pharmaceutical formulation(s) of the present invention to the patient. The pharmaceutical compositions of the present invention can be administered alone, or in combination with other therapeutic agents or interventions.

[0467] Therapeutic Methods

[0468] The present invention further provides methods of treating subjects having defects in hGDMLP-1—e.g., in expression, activity, distribution, localization, and/or solubility of hGDMLP-1—which can manifest as a disorder of heart and/or skeletal muscle function. As used herein, “treating” includes all medically-acceptable types of therapeutic intervention, including palliation and prophylaxis (prevention) of disease.

[0469] In one embodiment of the therapeutic methods of the present invention, a therapeutically effective amount of a pharmaceutical composition comprising hGDMLP-1 protein, fusion, fragment or derivative thereof is administered to a subject with a clinically-significant hGDMLP-1 defect.

[0470] Protein compositions are administered, for example, to complement a deficiency in native hGDMLP-1. In other embodiments, protein compositions are administered as a vaccine to elicit a humoral and/or cellular immune response to hGDMLP-1. The immune response can be used to modulate activity of hGDMLP-1 or, depending on the immunogen, to immunize against aberrant or aberrantly expressed forms, such as mutant or inappropriately expressed isoforms. In yet other embodiments, protein fusions having a toxi moiety are administered to ablate cells that aberrantly accumulate hGDMLP-1.

[0471] In another embodiment of the therapeutic methods of the present invention, a therapeutically effective amount of a pharmaceutical composition comprising nucleic acid of the present invention is administered. The nucleic acid can be delivered in a vector that drives expression of hGDMLP-1 protein, fusion, or fragment thereof, or without such vector.

[0472] Nucleic acid compositions that can drive expression of hGDMLP-1 are administered, for example, to complement a deficiency in native hGDMLP-1, or as DNA vaccines. Expression vectors derived from virus, replication deficient retroviruses, adenovirus, adeno-associated (AAV) virus, herpes virus, or vaccinia virus can be used—see, e.g., Cid-Arregui (ed.), Viral Vectors: Basic Science and Gene Therapy, Eaton Publishing Co., 2000 (ISBN: 188129935X)— as can plasmids.

[0473] Antisense nucleic acid compositions, or vectors that drive expression of hGDMLP-1 antisense nucleic acids, are administered to downregulate transcription and/or translation of hGDMLP-1 in circumstances in which excessive production, or production of aberrant protein, is the pathophysiologic basis of disease.

[0474] Antisense compositions useful in therapy can have sequence that is complementary to coding or to noncoding regions of the hGDMLP-1 gene. For example, oligonucleotides derived from the transcription initiation site, e.g., between positions −10 and +10 from the start site, are preferred.

[0475] Catalytic antisense compositions, such as ribozymes, that are capable of sequence-specific hybridization to hGDMLP-1 transcripts, are also useful in therapy. See, e.g., Phylactou, Adv. Drug Deliv. Rev. 44(2-3):97-108 (2000); Phylactou et al., Hum. Mol. Genet. 7(10):1649-53 (1998); Rossi, Ciba Found. Symp. 209:195-204 (1997); and Sigurdsson et al., Trends Biotechnol. 13(8):286-9 (1995), the disclosures of which are incorporated herein by reference in their entireties.

[0476] Other nucleic acids useful in the therapeutic methods of the present invention are those that are capable of triplex helix formation in or near the hGDMLP-1 genomic locus. Such triplexing oligonucleotides are able to inhibit transcription, Intody et al., Nucleic Acids Res. 28(21):4283-90 (2000); McGuffie et al., Cancer Res. 60(14):3790-9 (2000), the disclosures of which are incorporated herein by reference, and pharmaceutical compositions comprising such triplex forming oligos (TFOS) are administered in circumstances in which excessive production, or production of aberrant protein, is a pathophysiologic basis of disease.

[0477] In another embodiment of the therapeutic methods of the present invention, a therapeutically effective amount of a pharmaceutical composition comprising an antibody (including fragment or derivative thereof) of the present invention is administered. As is well known, antibody compositions are administered, for example, to antagonize activity of hGDMLP-1, or to target therapeutic agents to sites of hGDMLP-1 presence and/or accumulation.

[0478] In another embodiment of the therapeutic methods of the present invention, a pharmaceutical composition comprising a non-antibody antagonist of hGDMLP-1 is administered. Antagonists of hGDMLP-1 can be produced using methods generally known in the art. In particular, purified hGDMLP-1 can be used to screen libraries of pharmaceutical agents, often combinatorial libraries of small molecules, to identify those that specifically bind and antagonize at least one activity of hGDMLP-1.

[0479] In other embodiments a pharmaceutical composition comprising an agonist of hGDMLP-1 is administered. Agonists can be identified using methods analogous to those used to identify antagonists.

[0480] In still other therapeutic methods of the present invention, pharmaceutical compositions comprising host cells that express hGDMLP-1, fusions, or fragments thereof can be administered. In such cases, the cells are typically autologous, so as to circumvent xenogeneic or allotypic rejection, and are administered to complement defects in hGDMLP-1 production or activity.

[0481] In other embodiments, pharmaceutical compositions comprising the hGDMLP-1 proteins, nucleic acids, antibodies, antagonists, and agonists of the present invention can be administered in combination with other appropriate therapeutic agents. Selection of the appropriate agents for use in combination therapy can be made by one of ordinary skill in the art according to conventional pharmaceutical principles. The combination of therapeutic agents or approaches can act additively or synergistically to effect the treatment or prevention of the various disorders described above, providing greater therapeutic efficacy and/or permitting use of the pharmaceutical compositions of the present invention using lower dosages, reducing the potential for adverse side effects.

[0482] Transgenic Animals and Cells

[0483] In another aspect, the invention provides transgenic cells and non-human organisms comprising hGDMLP-1 nucleic acids, and transgenic cells and non-human organisms with targeted disruption of the endogenous orthologue of the human hGDMLP-1 gene.

[0484] The cells can be embryonic stem cells or somatic cells. The transgenic non-human organisms can be chimeric, nonchimeric heterozygotes, and nonchimeric homozygotes.

[0485] Diagnostic Methods

[0486] In order to diagnose, monitor, or assess predisposition to diseases caused by changes in the hGDMLP-1 gene, the nucleic acids of the present invention can be used as hybridization probes to assess the sequence and, at a grosser level, genomic structure of the hGDMLP-1 gene in samples of genomic DNA. The nucleic acids can also be used as hybridization probes to assess the levels of hGDMLP-1 mRNA in a sample derived from heart or muscle. Antibodies of the present invention can be used to assess the expression levels of hGMDLP-1 proteins in heart or muscle.

[0487] In another aspect, antibodies which specifically bind hGDMLP-1 may be used for the diagnosis of conditions or diseases characterized by expression of hGDMLP-1, or in assays to monitor patients being treated with hGDMLP-1, agonists, antagonists or inhibitors. The antibodies useful for diagnostic purposes can be prepared in the same manner as those described above for therapeutics. Diagnostic assays for hGDMLP-1 include methods which utilize the antibody and a label to detect hGDMLP-1 in human body fluids or extracts of cells or tissues. The antibodies may be used with or without modification, and may be labeled by joining them, either covalently or non-covalently, with a reporter molecule. A wide variety of reporter molecules which are known in the art may be used, several of which are described above.

[0488] A variety of protocols including ELISA, RIA, and fluorescence-activated cell sorting (FACS) for measuring hGDMLP-1 are known in the art and provide a basis for diagnosing altered or abnormal levels of hGDMLP-1 expression. Normal or standard values for hGDMLP-1 expression are established by combining body fluids or cell extracts taken from normal mammalian subjects, preferably human, with antibody to hGDMLP-1 under conditions suitable for complex formation. The amount of standard complex formation may be quantified by various methods, but preferably by photometric means. Quantities of hGDMLP-1 expressed in subject, control, and disease samples from biopsied tissues are compared with the standard values. Deviation between standard and subject values establishes the parameters for diagnosing disease.

[0489] In another embodiment of the invention, the polynucleotides encoding hGDMLP-1 can be used for diagnostic purposes. The polynucleotides which can be used include oligonucleotide sequences, complementary RNA and DNA molecules, and PNAs. The polynucleotides may be used to detect and quantitate gene expression in biopsied tissues in which expression of hGDMLP-1 may be correlated with disease. The diagnostic assay may be used to distinguish between absence, presence, and excess expression of hGDMLP-1, and to monitor regulation of hGDMLP-1 levels during therapeutic intervention.

[0490] In one aspect, hybridization with PCR probes which are capable of detecting polynucleotide sequences, including genomic sequences, encoding hGDMLP-1 or closely related molecules, may be used to identify nucleic acid sequences which encode hGDMLP-1. The specificity of the probe, whether it is made from a highly specific region, e.g., 10 unique nucleotides in the 5′ regulatory region, or a less specific region, e.g., especially in the 3′ coding region, and the stringency of the hybridization or amplification (maximal, high, intermediate, or low) will determine whether the probe identifies only naturally occurring sequences encoding hGDMLP-1, alleles, or related sequences.

[0491] Probes may also be used for the detection of related sequences, and should preferably contain at least 50% of the nucleotides from any of the hGDMLP-1 encoding sequences. The hybridization probes of the subject invention may be DNA or RNA and derived from the nucleotide sequence of SEQ ID NO:1, or from genomic sequence including promoter, enhancer elements, and introns of the naturally occurring hGDMLP-1 (SEQ ID NO:3).

[0492] Means for producing specific hybridization probes for DNAs encoding hGDMLP-1 include the cloning of nucleic acid sequences encoding hGDMLP-1 or hGDMLP-1 derivatives into vectors for the production of mRNA probes. Such vectors are known in the art, commercially available, and may be used to synthesize RNA probes in vitro by means of the addition of the appropriate RNA polymerases and the appropriate labeled nucleotides. Hybridization probes may be labeled by a variety of reporter groups, for example, radionuclides such as 32P or 35S, or enzymatic labels, such as alkaline phosphatase coupled to the probe via avidin/biotin coupling systems, and the like.

[0493] Polynucleotide sequences encoding hGDMLP-1 may be used for the diagnosis of a disorder associated with expression of hGDMLP-1, in particular heart and skeletal muscle disorders.

[0494] The polynucleotide sequences encoding hGDMLP-1 may be used in Southern or northern analysis, dot blot, or other membrane-based technologies; in PCR technologies; or in dipstick, pin, ELISA assays or microarrays utilizing fluids or tissues from patient biopsies to detect altered hGDMLP-1 expression. Such qualitative or quantitative methods are well known in the art.

[0495] The nucleotide sequences encoding hGDMLP-1 may be labeled by standard methods, and added to a fluid or tissue sample from a patient under conditions suitable for the formation of hybridization complexes. After a suitable incubation period, the sample is washed and the signal is quantitated and compared with a standard value. If the amount of signal in the biopsied or extracted sample is significantly altered from that of a comparable control sample, the nucleotide sequences have hybridized with nucleotide sequences in the sample, and the presence of altered levels of nucleotide sequences encoding hGDMLP-1 in the sample indicates the presence of the associated disease. Such assays may also be used to evaluate the efficacy of a particular therapeutic treatment regimen in animal studies, in clinical trials, or in monitoring the treatment of an individual patient.

[0496] In order to provide a basis for the diagnosis of disease associated with expression of hGDMLP-1, a normal or standard profile for expression is established. This may be accomplished by combining body fluids or cell extracts taken from normal subjects, either animal or human, with a sequence, or a fragment thereof, which encodes hGDMLP-1, under conditions suitable for hybridization or amplification. Standard hybridization may be quantified by comparing the values obtained from normal subjects with those from an experiment where a known amount of a substantially purified polynucleotide is used. Standard values obtained from normal samples may be compared with values obtained from samples from patients who are symptomatic for disease. Deviation between standard and subject values is used to establish the presence of disease.

[0497] Once disease is established and a treatment protocol is initiated, hybridization assays may be repeated on a regular basis to evaluate whether the level of expression in the patient begins to approximate that which is observed in the normal patient. The results obtained from successive assays may be used to show the efficacy of treatment over a period ranging from several days to months.

[0498] With respect to cancer, the presence of a relatively high amount of transcript in biopsied tissue from an individual may indicate a predisposition for the development of the disease, or may provide a means for detecting the disease prior to the appearance of actual clinical symptoms. A more definitive diagnosis of this type may allow health professionals to employ preventative measures or aggressive treatment earlier thereby preventing the development or further progression of the cancer.

[0499] Additional diagnostic uses for oligonucleotides designed from the sequences encoding hGDMLP-1 may involve the use of PCR. Such oligomers may be chemically synthesized, generated enzymatically, or produced in vitro. Oligomers will preferably consist of two nucleotide sequences, one with sense orientation and another with antisense, employed under optimized conditions for identification of a specific gene or condition. The same two oligomers, nested sets of oligomers, or even a degenerate pool of oligomers may be employed under less stringent conditions for detection and/or quantitation of closely related DNA or RNA sequences.

[0500] Methods which may also be used to quantitate the expression of hGDMLP-1 include radiolabeling or biotinylating nucleotides, coamplification of a control nucleic acid, and standard curves onto which the experimental results are interpolated (Melby, P. C. et al. (1993) J. Immunol. Methods, 159:235-244; Duplaa, C. et al. (1993) Anal. Biochem. 229-236). The speed of quantitation of multiple samples may be accelerated by running the assay in an ELISA format where the oligomer of interest is presented in various dilutions and a spectrophotometric or calorimetric response gives rapid quantitation.

[0501] In further embodiments, an oligonucleotide derived from any of the polynucleotide sequences described herein may be used as a target in a microarray. The microarray can be used to monitor the expression level of large numbers of genes simultaneously (to produce a transcript image), and to identify genetic variants, mutations and polymorphisms. This information will be useful in determining gene function, understanding the genetic basis of disease, diagnosing disease, and in developing and monitoring the activity of therapeutic agents (Heller, R. et al. (1997) Proc. Natl. Acad. Sci. 94:2150-55).

[0502] In one embodiment, the microarray is prepared and used according to the methods described in PCT application WO95/11995 (Chee et al.), Lockhart, D. J. et al. (1996; Nat. Biotech. 14: 1675-1680) and Schena, M. et al. (1996; Proc. Natl. Acad. Sci. 93: 10614-10619), all of which are incorporated herein in their entirety by reference.

[0503] The microarray is preferably composed of a large number of unique, single-stranded nucleic acid sequences, usually either synthetic antisense oligonucleotides or fragments of cDNAs, fixed to a solid support. The oligonucleotides are preferably about 6-60 nucleotides in length, more preferably 15-30 nucleotides in length, and most preferably about 20-25 nucleotides in length. For a certain type of microarray, it may be preferable to use oligonucleotides which are only 7-10 nucleotides in length. The microarray may contain oligonucleotides which cover the known 5′ or 3′ sequence, sequential oligonucleotides which cover the full length sequence, or unique oligonucleotides selected from particular areas along the length of the sequence. Polynucleotides used in the microarray may be oligonucleotides that are specific to a gene or genes of interest in which at least a fragment of the sequence is known or that are specific to one or more unidentified cDNAs which are common to a particular cell type, developmental or disease state.

[0504] In order to produce oligonucleotides to a known sequence for a microarray, the gene of interest is examined using a computer algorithm which starts at the 5′, or more preferably, at the 3′ end of the nucleotide sequence. The algorithm identifies oligomers of defined length that are unique to the gene, have a GC content within a range suitable for hybridization, and lack predicted secondary structure that may interfere with hybridization. In certain situations it may be appropriate to use pairs of oligonucleotides on a microarray. The “pairs” will be identical, except for one nucleotide which preferably is located in the center of the sequence. The second oligonucleotide in the pair (mismatched by one) serves as a control. The number of oligonucleotide pairs may range from two to one million. The oligomers are synthesized at designated areas on a substrate using a light-directed chemical process. The substrate may be paper, nylon or other type of membrane, filter, chip, glass slide or any other suitable solid support.

[0505] In another aspect, an oligonucleotide may be synthesized on the surface of the substrate by using a chemical coupling procedure and an ink jet application apparatus, as described in PCT application WO95/251116 (Baldeschweiler et al.) which is incorporated herein in its entirety by reference. In another aspect, a “gridded” array analogous to a dot (or slot) blot may be used to arrange and link cDNA fragments or oligonucleotides to the surface of a substrate using a vacuum system, thermal, UV, mechanical or chemical bonding procedures. An array, such as those described above, may be produced by hand or by using available devices (slot blot or dot blot apparatus), materials (any suitable solid support), and machines (including robotic instruments), and may contain 8, 24, 96, 384, 1536 or 6144 oligonucleotides, or any other number between two and one million which lends itself to the efficient use of commercially available instrumentation.

[0506] In order to conduct sample analysis using a microarray, the RNA or DNA from a biological sample is made into hybridization probes. The mRNA is isolated, and cDNA is produced and used as a template to make antisense RNA (aRNA). The aRNA is amplified in the presence of fluorescent nucleotides, and labeled probes are incubated with the microarray so that the probe sequences hybridize to complementary oligonucleotides of the microarray. Incubation conditions are adjusted so that hybridization occurs with precise complementary matches or with various degrees of less complementarity. After removal of nonhybridized probes, a scanner is used to determine the levels and patterns of fluorescence. The scanned images are examined to determine degree of complementarity and the relative abundance of each oligonucleotide sequence on the microarray. The biological samples may be obtained from any bodily fluids (such as blood, urine, saliva, phlegm, gastric juices, etc.), cultured cells, biopsies, or other tissue preparations. A detection system may be used to measure the absence, presence, and amount of hybridization for all of the distinct sequences simultaneously. This data may be used for large scale correlation studies on the sequences, mutations, variants, or polymorphisms among samples.

[0507] In another embodiment of the invention, the nucleic acid sequences which encode hGDMLP-1 may also be used to generate hybridization probes which are useful for mapping the naturally occurring genomic sequence. The sequences may be mapped to a particular chromosome, to a specific region of a chromosome or to artificial chromosome constructions, such as human artificial chromosomes (HACs), yeast artificial chromosomes (YACs), bacterial artificial chromosomes (BACs), bacterial P1 constructions or single chromosome cDNA libraries as reviewed in Price, C. M. (1993) Blood Rev. 7:127-134, and Trask, B. J. (1991) Trends Genet. 7:149-154.

[0508] Fluorescent in situ hybridization (FISH as described in Verma et al. (1988) Human Chromosomes: A Manual of Basic Techniques, Pergamon Press, New York, N.Y.) may be correlated with other physical chromosome mapping techniques and genetic map data. Examples of genetic map data can be found in various scientific journals or at Online Mendelian Inheritance in Man (OMIM). Correlation between the location of the gene encoding hGDMLP-1 on a physical chromosomal map and a specific disease, or predisposition to a specific disease, may help delimit the region of DNA associated with that genetic disease. The nucleotide sequences of the subject invention may be used to detect differences in gene sequences between normal, carrier, or affected individuals.

[0509] In situ hybridization of chromosomal preparations and physical mapping techniques such as linkage analysis using established chromosomal markers may be used for extending genetic maps. Often the placement of a gene on the chromosome of another mammalian species, such as mouse, may reveal associated markers even if the number or arm of a particular human chromosome is not known. New sequences can be assigned to chromosomal arms, or parts thereof, by physical mapping. This provides valuable information to investigators searching for disease genes using positional cloning or other gene discovery techniques. Once the disease or syndrome has been crudely localized by genetic linkage to a particular genomic region, for example, AT to 11q22-23 (Gatti, R. A. et al. (1988) Nature 336:577-580), any sequences mapping to that area may represent associated or regulatory genes for further investigation. The nucleotide sequence of the subject invention may also be used to detect differences in the chromosomal location due to translocation, inversion, etc. among normal, carrier, or affected individuals.

[0510] In another embodiment of the invention, hGDMLP-1, its catalytic or immunogenic fragments or oligopeptides thereof, can be used for screening libraries of compounds in any of a variety of drug screening techniques. The fragment employed in such screening may be free in solution, affixed to a solid support, borne on a cell surface, or located intracellularly. The formation of binding complexes, between hGDMLP-1 and the agent being tested, may be measured.

[0511] Another technique for drug screening which may be used provides for high throughput screening of compounds having suitable binding affinity to the protein of interest as described in published PCT application WO84/03564. In this method, as applied to hGDMLP-1 large numbers of different small test compounds are synthesized on a solid substrate, such as plastic pins or some other surface. The test compounds are reacted with hGDMLP-1, or fragments thereof, and washed. Bound hGDMLP-1 is then detected by methods well known in the art. Purified hGDMLP-1 can also be coated directly onto plates for use in the aforementioned drug screening techniques. Alternatively, non-neutralizing antibodies can be used to capture the peptide and immobilize it on a solid support.

[0512] In another embodiment, one may use competitive drug screening assays in which neutralizing antibodies capable of binding hGDMLP-1 specifically compete with a test compound for binding hGDMLP-1. In this manner, the antibodies can be used to detect the presence of any peptide which shares one or more antigenic determinants with hGDMLP-1.

[0513] In additional embodiments, the nucleotide sequences which encode hGDMLP-1 may be used in any molecular biology techniques that have yet to be developed, provided the new techniques rely on properties of nucleotide sequences that are currently known, including, but not limited to, such properties as the triplet genetic code and specific base pair interactions.

[0514] The following examples are provided by way of illustration and not by way of limitation.

### EXAMPLE 1

### Identification and Characterization of a cDNA Encoding a Novel Human Genome-derived Myosin-like Gene

[0515] In order to identify novel human genes that predispose or contribute to diseases caused by perturbations of the cellular contractile apparatus, we undertook to mine human genomic DNA for exons particularly expressed in human cardiac and/or skeletal muscle, looking in particular for those that are part of genes that have proven refractory to prior identification efforts based upon cloning and/or sequencing of expressed transcripts.

[0516] Briefly, bioinformatic algorithms were applied to human genomic sequence data to identify putative exons. Each of the predicted exons was amplified from genomic DNA, typically centering the putative coding sequence within a larger amplicon that included flanking noncoding sequence. These genome-derived single exon probes were arrayed on a solid support and expression of the bioinformatically predicted exons assessed through a series of simultaneous two-color hybridizations to the genome-derived single exon microarrays. The approach and procedures are further described in detail in Penn et al., “Mining the Human Genome using Microarrays of Open Reading Frames,” Nature Genetics 26:315-318 (2000); commonly owned and copending U.S. patent application Ser. No. 09/774,203, filed Jan. 29, 2001; and commonly owned and copending U.S. provisional patent application No. 60/207,456, filed May 26, 2000, No. 60/234,687, filed Sep. 21, 2000, and No. 60/236,359, filed Sep. 27, 2000, the disclosures of which are incorporated herein by reference in their entireties.

[0517] Using a graphical display particularly designed to facilitate computerized query of the resulting exon-specific expression data, as further described in commonly owned and copending U.S. patent application Ser. No. 09/774,203, filed Jan. 29, 2001, an exon was identified that is expressed at high levels in human heart but in none of nine other tested tissues or cell types.

[0518] FIG. 1 is a screen shot of the graphical display in which the heart-specific exon is, for purpose of exemplification, centered in the view pane. A black line, demarcated at regular intervals in megabases (“Mb”), represents a continuous stretch of human chromosome 22 (“genome sequence line”). Below the line, in a horizontal field labeled “amp”, are rectangles (blue in the original display) that identify regions of chromosome 22 that were, in one or another experiment, amplified from genomic DNA. The rectangles are aligned with the genome sequence line to show the starting and ending nucleotides of the amplicons.

[0519] Moving downward in the view pane, horizontal fields are presented that show expression measured for various of the amplicons in human heart (“HEA”), brain (“BRA”), adult liver (“ADU”), HeLa cells (“HEL”), lung (“LUN”), fetal liver (“FET”), HBL100 cells (“HBL”), bone marrow (“BON”), BT4 cells (“BT4”), and placenta (“PLA”). As further described in commonly owned and copending U.S. patent application Ser. No. 09/774,203, the expression relative to control (here a pool of message from 10 tissues) is shown in the original display in shades of red and green, with green indicating expression greater than control.

[0520] As can be seen in FIG. 1, the exon centered at about 11.1052 Mb is expressed at levels above control solely (among the tested tissues and cell types) in human heart, meeting our inclusion criteria for further study.

[0521] Standard RACE (rapid amplification of cDNA ends) and RT-PCR (reverse transcription polymerase chain reaction) techniques were used to obtain overlapping cDNA clones that collectively span 8,166 nucleotides and appear to contain the entire coding region of the gene. RT-PCR and RACE techniques are described, inter alia, in Siebert et al. (eds.), Gene Cloning and Analysis by RT-PCR, Eaton Publishing Company/Bio Techniques Books Division, 1998 (ISBN: 1881299147); Schaefer, Anal. Biochem. 20:227(2):255-73 (1995); Ausubel et al. (eds.), Short Protocols in Molecular Biology: A Compendium of Methods from Current Protocols in Molecular Biology, 4^{th} edition (April 1999), John Wiley & Sons (ISBN: 047132938X) and Sambrook et al. (eds.), Molecular Cloning: A Laboratory Manual (3^{rd} ed.), Cold Spring Harbor Laboratory Press (2000) (ISBN: 0879695773), the disclosures of which are incorporated herein by reference in their entireties. The cDNA was sequenced on both strands using a MegaBace™ sequencer (Molecular Dynamics, Inc., Sunnyvale, Calif., USA).

[0522] FIGS. 2A-2L collectively present the sequence of the cDNA (SEQ ID NO:1) and its translation (SEQ ID NO:3). For reasons set forth below, we have denominated the novel gene hGDMLP-1.

[0523] The hGDMLP-1 cDNA spans 8166 nucleotides and contains an open reading frame from nucleotide 170 through and including nt 7876, predicting a protein of 2568 amino acids (285.3 kD absent post-translational modification). The clone appears full length, with the reading frame opening with a methionine and terminating with a stop codon before a 3′ poly-A tail.

[0524] Structurally, the N-terminal 600 amino acids, as well as the C-terminal 1100 amino acids (1400-2568) are quite hydrophilic, with fully one third of the amino acids of the first 480 residues strongly acidic or basic.

[0525] Motif searches using Pfam (http://pfam.wustl.edu/), SMART (http://smart.embl-heidelberg.de/), and PROSITE pattern and profile databases (http://www.expasy.ch/prosite/), identified several known domains. A myosin head (also denominated myosin motor, large ATPase) domain is encoded by amino acid residues 566-1335; a myosin tail domain is located at residues 1422-1919. Given the presence of a myosin head and a myosin tail, we have denominated the gene “human genome-derived myosin-like protein-1” (“hGDMLP-1”).

[0526] In addition to myosin head and myosin tail domains, SMART and Pfam both additionally identified an IQ domain at residues 1336-1358. The IQ domain is a short calmodulin-binding motif containing conserved Ile and Gln residues, suggesting interaction of hGDMLP-1 with calmodulin, which is known to serve as the light chain for myosins I and V.

[0527] The sequence of the hGDMLP-1 cDNA was used a BLAST query into the GenBank nr and dbEst databases. The nr database includes all non-redundant GenBank coding sequence translations, sequences derived from the 3-dimensional structures in the Brookhaven Protein Data Bank (PDB), sequences from SwissProt, sequences from the protein information resource (PIR), and sequences from protein research foundation (PRF). The dbEst (database of expressed sequence tags) includes ESTs, short, single pass read cDNA (mRNA) sequences, and cDNA sequences from differential display experiments and RACE experiments.

[0528] A number of ESTs showing strong sequence similarity to short regions of the hGDMLP-1 coding sequence were identified, as was an EST identical to exons 15 and 16 of hGDMLP-1 (EST accession no. AA993492: “ot64g05.s1 Soares_testis_NHT Homo sapiens cDNA clone IMAGE:1621592 3′ similar to TR:Q92614 Q92614 MYELOBLAST KIAA0216. ;, mRNA”) (spanning nt 2954-3174 according to numbering in SEQ ID NO:1).

[0529] Nonetheless, hGDMLP-1 has not previously been identified as a full length clone. Two full length genes prior-accessioned into GenBank do, however, appear to be closely related.

[0530] The first is a murine myosin gene containing a PDZ domain (mysPDZ) (GenBank accession no. BAA93660), further described by Furusawa et al., “Isolation of a novel PDZ-containing myosin from hematopoietic supportive bone marrow stromal cell lines,” Biochem. Biophys. Res. Commun. 270(l):67-75 (2000), the disclosure of which is incorporated herein by reference in its entirety. In the region of greatest similarity—residues 477-2270 of hGDMLP-1—hGDMLP-1 and BAA93660 show 40% identity and 60% similarity at the amino acid level, with similarity scored according to the NCBI BLAST standard BLOSUM matrix (Henikoff et al., Proc. Natl. Acad. Sci. USA 89:10915-10919 (1992); Henikoff et al., Proteins 17:49-61 (1993)). This region includes both the hGDMLP myosin head domain and myosin tail domain.

[0531] hGDMLP-1 is also highly similar across the same region (residues 477-2270 of hGDMLP-1) to the human orthologue of the murine PDZ-containing myosin in mouse (accession no. BAA13206), showing 40% identity and 61% similarity to hGDMLP-1 at the amino acid level.

[0532] FIGS. 3A-3C collectively show a multiple sequence alignment of hGDMLP-1 (amino acid residues 505-2249) with BAA93660 (murine PDZ-containing myosin-like gene, residues 341-2035) and BAA13206 (human myosin heavy chain-like gene containing P-loop, residues 1-1581). Gaps are shown within a sequence as one or more dashes (-). In the consensus line underlying the three aligned sequences, “*” indicates residues that are identical or conserved in all sequences in the alignment, “:” indicates conserved substitutions, and “.”=indicates semi-conserved substitutions.

[0533] Further directed comparison of hGDMLP-1 with 10 other proteins previously identified to be myosin or myosin-like confirms that hGDMLP-1 is most similar in sequence to mysPDZ. Significant similarity was also detected to human (but not murine) myocilin (myoC). FIG. 4 shows pairwise alignment of hGDMLP-1 to human myocilin (myoC). As shown, in the region of maximal similarity in amino acid sequence, 28% of residues are identical; 54% of residues are similar, with similarity scored according to the BLOSUM 62 matrix.

[0534] Both mysPDZ and myoc are cytoskeleton-associated proteins. MyoC is associated with glaucoma, has a secreted form, and is found in association with cilia in photoreceptor cells. Based upon these sequence similarities, hGDMLP-1 is a myosin-like protein that is cytoskeleton-associated.

[0535] Separately querying GenBank with sequence drawn from the hydrophilic N-terminus and C-terminus of hGDMLP-1, the N-terminal region (112-515) is seen to have some sequence similarity to collagen alpha and other hydrophilic proteins (such as cylicin and neurofilament triplet H protein), whereas the C-terminal end of the protein is unique.

### EXAMPLE 2

### Identification and Characterization of a Genomic Region Encoding hGDMLP-1

[0536] BLAST query of genomic sequence identified four BACs that constitute the minimum set of clones encompassing the cDNA sequence (FIG. 5).

[0537] Based upon the known origin of the four BACs (AL022329, AL080245, Z98949 and AL079300) that encompass hGDMLP-1, the gene can be mapped to human chromosome 22q11.2, about 1 Mb distal to the 22q11 low copy repeat region.

[0538] Comparison of the cDNA and genomic sequences identified 44 exons, occupying a 288 kb region on chromosome 22q11.2. Exon organization is listed in Table 1.

TABLE I
hGDMLP-1 Exon Structure

| Exon | | | BAC |
|---|---|---|---|
| no. | cDNA range | genomic range | accession |
| 1 | 1-60 | 192976-193035 | AL022329.9 |
| 2 | 61-208 | 211726-211873 | |
| 3 | 209-367 | 213973-214131 | |
| 4 | 368-1681 | 218857-220170 | |
| 5 | 1682-1748 | 220852-220918 | |
| 6 | 1749-1861 | 206-318 | AL080245.14 |
| 7 | 1862-2038 | 1668-1844 | |
| 8 | 2039-2237 | 6917-7115 | |
| 9 | 2238-2380 | 9390-9532 | |
| 10 | 2381-2481 | 11068-11168 | |
| 11 | 2482-2545 | 14762-14825 | |
| 12 | 2546-2690 | 27287-27431 | |
| 13 | 2691-2864 | 52839-53012 | |
| 14 | 2865-2955 | 55743-55833 | |
| 15 | 2956-3148 | 58110-58302 | |
| 16 | 3149-3229 | 62251-62331 | |
| 17 | 3230-3380 | 560-710 | Z98949.1 |
| 18 | 3381-3540 | 9002-9161 | |
| 19 | 3541-3724 | 11367-11550 | |
| 20 | 3725-3947 | 12697-12919 | |
| 21 | 3948-4057 | 16737-16846 | |
| 22 | 4058-4123 | 33587-33652 | |
| 23 | 4124-4252 | 39553-39681 | |
| 24 | 4253-4396 | 41456-41599 | |
| 25 | 4397-4486 | 43226-43315 | |
| 26 | 4487-4606 | 56023-56142 | |
| 27 | 4607-4715 | 56571-56679 | |
| 28 | 4716-4840 | 60423-60547 | |
| 29 | 4841-4995 | 63574-63728 | |
| 30 | 4996-5119 | 67880-68003 | |
| 31 | 5120-5320 | 68898-69098 | |
| 32 | 5321-5431 | 73589-73699 | |
| 33 | 5432-5536 | 76213-76317 | |
| 34 | 5537-5689 | 86524-86676 | |
| 35 | 5690-5803 | 111403-111516 | |
| 36 | 5804-5920 | 112978-113094 | |
| 37 | 5921-6004 | 115633-115716 | |
| 38 | 6005-6142 | 117552-117689 | |
| 39 | 6143-6328 | 120445-120630 | |
| 40 | 6329-6459 | 157629-157759 | |
| 41 | 6460-6504 | 168531-168575 | |
| 42 | 6505-6642 | 169984-170121 | |
| 43 | 6643-7888 | 18298-19543 | AL079300.11 |
| 44 | 7889-8090 | 22296-22497 | |

### EXAMPLE 3

### Expression and Transcription Control of hGDMLP-1

[0539] Exons 1, 3, 4, 7, 8, 9, 15, 20, 24, 31, 39, 43, and 44 of hGDMLP-1 were separately amplified and the genome-derived single-exon probes arrayed for expression analysis essentially as described in Penn et al., “Mining the Human Genome using Microarrays of Open Reading Frames,” Nature Genetics 26:315-318 (2000) and commonly owned and copending U.S. patent application Ser. No. 09/774,203, filed Jan. 29, 2001, the disclosures of which are incorporated herein by reference in their entireties.

[0540] Table 2 reports the results of hybridization experiments. “Amplicon” is a unique designation. “Signal” indicates normalized signal intensity. “Ratio” is the ratio of expression relative to control. “ND” indicates “not determined”.

TABLE 2

| | SIGNAL | RATIO | SIGNAL | RATIO | SIGNAL | RATIO |
|---|---|---|---|---|---|---|
| | Amp_2534, | | Amp_2541, | | Amp_2540, | |
| | exon 1 | | exon 3 | | exon 3 | |
| ADRENAL | 0.71 | 1.43 | 0.94 | | 0.7 | 1.15 |
| ADULT LIVER | 0.52 | 1.13 | 0.46 | | 0.59 | 1.11 |
| BONE MARROW | 0.71 | | 0.77 | | 0.95 | |
| BRAIN | 0.52 | −1.06 | | | 0.83 | −1.37 |
| FETAL LIVER | 0.49 | | 0.47 | 1.29 | 0.72 | 1.06 |
| HEART | 1.86 | 3.33 | 2.01 | 3.13 | 2.52 | 2.77 |
| HELA | 0.71 | | 0.72 | −1.02 | 0.82 | 1.03 |
| KIDNEY | 0.61 | −1.11 | 0.66 | 1.01 | 0.81 | |
| LUNG | 0.66 | −1.2 | 0.73 | −1.06 | 0.83 | −1.02 |
| PLACENTA | 0.46 | | 0.55 | 2.59 | 0.57 | |
| PROSTATE | 0.26 | | 0.58 | −1.11 | 0.58 | 1.15 |
| SKELETAL | 9.61 | 6.61 | 3.38 | 5.14 | 4.04 | |
| MUSCLE | | | | | | |
| | Amp_38, | | Amp_10400, | | Amp_11966, | |
| | exon 4 | | exon 4 | | exon 4 | |
| ADRENAL | 4.12 | | ND | ND | ND | ND |
| ADULT LIVER | 6.54 | −1.28 | 1.56 | | 2.41 | |
| BONE MARROW | | −1.29 | 1.77 | −1.15 | 2.35 | 1.08 |
| BRAIN | | −1.58 | 1.8 | −1.15 | 1.75 | −1.23 |
| FETAL LIVER | | −1.3 | 1.49 | | 2.47 | −1.28 |
| HEART | 6.23 | −1.05 | 2.9 | 1.36 | 3.16 | −1.02 |
| HELA | 6.08 | −1.11 | 1.91 | 1.11 | 2.07 | −1.01 |
| KIDNEY | 6.71 | −1.09 | ND | ND | ND | ND |
| LUNG | 7.15 | −1.02 | 0.99 | −1.38 | 1.95 | −1.05 |
| PLACENTA | | | 2.09 | 1.02 | 2.2 | −1.12 |
| PROSTATE | | −1.16 | ND | ND | ND | ND |
| SKELETAL | 8.12 | 1.04 | ND | ND | ND | ND |
| MUSCLE | | | | | | |
| | Amp_33835, | | Amp_9715, | | Amp_73301, | |
| | exon 7 | | exon 7 | | exon 8 | |
| ADRENAL | 2.72 | −1.72 | ND | ND | 0.87 | −1.02 |
| ADULT LIVER | 3.32 | −1.76 | 2.88 | | 1.14 | −1.27 |
| BONE MARROW | 2.53 | −1.85 | 2.99 | −1.22 | 0.79 | |
| BRAIN | 2.46 | −1.61 | 3.92 | 1.09 | 0.66 | −1.29 |
| FETAL LIVER | 2.39 | −1.77 | 3.14 | −1.2 | 0.89 | 1.08 |
| HEART | 2.13 | −2.04 | 3.05 | −1.18 | 1.38 | |
| HELA | 2.71 | −1.65 | 3.05 | −1.17 | 0.89 | −1.12 |
| KIDNEY | 2.79 | −1.85 | ND | ND | 1.22 | 1.11 |
| LUNG | 2.97 | −1.82 | 2.59 | −1.15 | 0.9 | −1.13 |
| PLACENTA | 2.98 | −1.69 | 3.19 | −1.05 | 1.14 | |
| PROSTATE | 2.89 | −1.39 | ND | ND | 0.97 | 1.05 |
| SKELETAL | 2.14 | −1.97 | ND | ND | 2.49 | 2.04 |
| MUSCLE | | | | | | |
| | Amp_73302, | | Amp_33836, | | Amp_10252, | |
| | exon 9 | | exon 15 | | exon 15 | |
| ADRENAL | 3.43 | 1.22 | 0.84 | 1.3 | ND | ND |
| ADULT LIVER | 3.88 | 1.21 | | 1.22 | 1.28 | |
| BONE MARROW | 3.68 | 1.06 | 0.64 | 1.34 | 1.68 | −1.1 |
| BRAIN | 4.28 | 1.57 | 0.67 | 1.32 | 1.86 | −1.08 |
| FETAL LIVER | 4.28 | 1.33 | 0.78 | 1.5 | 1.31 | −1.27 |
| HEART | 3.19 | −1.09 | | 1.75 | 1.9 | 1.26 |
| HELA | 3.45 | 1.03 | 0.64 | | 1.36 | −1.09 |
| KIDNEY | 3.99 | 1.03 | 0.71 | −1.09 | ND | ND |
| LUNG | 3.83 | 1.33 | 0.71 | | 1.03 | −1.33 |
| PLACENTA | 4.1 | 1.29 | 0.84 | 1.09 | 1.37 | −1.23 |
| PROSTATE | 3.89 | 1.38 | 0.75 | | ND | ND |
| SKELETAL | 3.08 | −1.04 | | | ND | ND |
| MUSCLE | | | | | | |
| | Amp_92329, | | Amp_92328, | | Amp_92327, | |
| | exon 20 | | exon 24 | | exon 31 | |
| ADRENAL | 0.59 | 1.34 | 3.96 | 1.3 | 0.46 | |
| ADULT LIVER | 0.63 | 1.56 | 6.05 | 1.54 | 0.44 | 2.83 |
| BONE MARROW | 0.5 | | | 1.34 | | |
| BRAIN | | | | | 0.46 | |
| FETAL LIVER | 0.69 | 2.01 | 4.47 | 1.35 | 0.33 | |
| HEART | 0.67 | 1.49 | 4.32 | 1.17 | | |
| HELA | 0.61 | 1.57 | 4.55 | 1.37 | 0.42 | |
| KIDNEY | 0.65 | | 5.68 | 1.28 | 0.5 | |
| LUNG | 0.65 | 2.85 | 4.1 | 1.42 | 0.42 | |
| PLACENTA | | | 3.59 | 1.4 | 0.48 | |
| PROSTATE | 0.67 | 1.41 | 3.07 | 1.43 | 0.49 | |
| SKELETAL | 0.66 | | 3.95 | 1.26 | 0.69 | |
| MUSCLE | | | | | | |
| | Amp_92326, | | Amp_40, exon | | Amp_5271, | |
| | exon 39 | | 43 | | exon 43 | |
| ADRENAL | 2.14 | 1.01 | | | ND | ND |
| ADULT LIVER | 2.67 | 1.06 | 0.82 | | 0.56 | −1.22 |
| BONE MARROW | 2.05 | −1.15 | | | 0.42 | −3.09 |
| BRAIN | 2.1 | 1.15 | 0.99 | 1.28 | 0.44 | 1.13 |
| FETAL LIVER | 2.01 | −1.08 | 0.72 | 1.07 | 0.48 | |
| HEART | 2.95 | 1.37 | | | | |
| HELA | 2 | −1.05 | 0.9 | 1.08 | 0.39 | |
| KIDNEY | 3.55 | 1.15 | 0.99 | 1.34 | ND | ND |
| LUNG | 2.09 | 1.09 | | 1.75 | 0.47 | −1.32 |
| PLACENTA | 2.44 | −1.02 | 0.71 | 1.85 | 0.42 | −1.23 |
| PROSTATE | 2.23 | 1.09 | 0.73 | | ND | ND |
| SKELETAL | 3.1 | 1.59 | 15.04 | | ND | ND |
| MUSCLE | | | | | | |
| | Amp_5272, | | Amp_5273, | | Amp_2920, | |
| | exon 43 | | exon 43 | | exon 44 | |
| ADRENAL | ND | ND | ND | ND | | 1.07 |
| ADULT LIVER | 0.55 | −1.48 | 0.57 | −2.46 | 1.3 | −1.34 |
| BONE MARROW | 0.54 | | 0.51 | −1.93 | 1.32 | −1.14 |
| BRAIN | 0.49 | | 0.48 | −4.19 | | −1.3 |
| FETAL LIVER | 0.53 | −1.64 | 0.78 | −3.56 | 1.2 | −1.5 |
| HEART | | 5.74 | | 6.44 | | |
| HELA | 0.52 | | 0.45 | | 1.13 | 1 |
| KIDNEY | ND | ND | ND | ND | 1.08 | −1.01 |
| LUNG | 0.67 | −1.04 | 0.65 | | | −1.14 |
| PLACENTA | 0.48 | 1.87 | | | | −1.36 |
| PROSTATE | ND | ND | ND | ND | | 1.44 |
| SKELETAL | ND | ND | ND | ND | 3.6 | |
| MUSCLE | | | | | | |

ND = NOT DETERMINED

[0541] As can be seen in table 2, skeletal muscle and heart are the primary locations of hGDMLP-1 expression.

[0542] Heart and skeletal muscle-specific expression was further confirmed by northern blot analysis using amplicon 40 (exon 43) as probe. As shown in FIG. 6, of the 12 tissues assayed—blood, leukocytes, lung, placenta, small intestine, liver, kidney, spleen, thymus, colon, skeletal muscle, heart and brain—only skeletal muscle and heart demonstrate expression, with both having an 8 kb transcript.

[0543] Possession of the genomic sequence permitted search for promoter and other control sequences for the hGDMLP-1 gene.

[0544] A putative transcriptional control region, inclusive of promoter and downstream elements, was defined as 2 kb around the transcription start site, itself defined as the first nucleotide of the cDNA clone. The region, drawn from sequence of BAC AL022329, has the following sequence, where nucleotide number 1001 is the transcription start site:

| | |
|---|---|
| tgatttttttttttttttttgagatggagtctctctctgtcaccc | (SEQ ID NO:15,752) |
| aggctggagtgcagtggcgcgatctcggcttactgcaagctccgc | |
| ctgtagctgggactacaggcgcccaccaccacgcccggctaattt | |
| tgtttttgtatttttagtagagacggggtttcactgtgttagcca | |
| ggatggtctcaatctcctgacctcgtgatatgcccacctcggctt | |
| cccaaagtgccgggattacagacgtgagccaccgtgccaggccca | |
| aagcacttttttatagcccctagtttgctgttgtgtctgtttcct | |
| ctacggcccgcacagcctgggtttgaattctggctctccatggcc | |
| ttgggcaagttggttaactttttgtgtctcaatttccccacttgt | |
| aaagtggggctggggaaaaaccctacctcatagggaacattaagt | |
| gagttcatgaaagccctcggtgtgtggcatgcgataaccactacc | |
| taagcataaggtatgtttacatgcactggttgtttaccacgacgc | |
| accagcattcattcaagttattttcttccagagtctgcctggaat | |
| gtagaaccggccagctctcctcotcaaacagttcctgcaacctct | |
| ggttatctgtgtgggcagaggcgggagtgtgggtgtgtggccctg | |
| ccctgggacagggatgacgagagagcatgtgcttgtgtccagagc | |
| tgtccccttccctgctcaggggccaccaaatatgtccatggtctc | |
| tgctgcctggtcaacggccaccccgggctgccgtctcctggccag | |
| acctggagctcacaagctaattttagaaatgactggtcgactcag | |
| ctgctgctatcacattggcccagaaggagggtggggggaggacgg | |
| gtcggggaggggcagtaaggggaagggatgtgtgtcggtgtgtgt | |
| ggagagGGTGCTCCTTCGCTCCTGCTTTCCCGGCTCGGTGGGGTC | |
| CCTTCGCGGCcacccggggagacgtcttagacagtcgtggttcct | |
| gtgatctgtgtcctctttgcagaaggtactattqggctgggtttt | |
| agacgggcaccttgcgagcggatcggcgagttttaattttccgga | |
| atgogctgctgggggctgcggtggcaggcctccggtcttttggtc | |
| tattttaggcctttctggtgttgagagcttccgaggcctgattcc | |
| tttgcctgttgcccgtgctgctcactttgaaaacaagagtgtttc | |
| ggtggaaggatttgagaacaaaatgctggggcaaatggacattcg | |
| taagaatcactctcctcaggccccagctgttcgctaataattttt | |
| aaaaatgtgtttagaatcatgagttaatctccactgtgaatcttt | |
| gcccgcagacgtcagggtttatatttttcctcaactaccagtaat | |
| ttctgcttcactggtgttcagttatggtcggggaagagccaggct | |
| tcccctttcgtgttaacaacgctgttgagtcgaaatgttaatttt | |
| aatgttcttttttaaactgcaaattaagcatgtatgagtgttggg | |
| ggaagggcaatggaagttcatggctgaaggtttcaatttcatgcc | |
| accttccttgagctctgtctgagggaaggtgtcttatctggcacc | |
| ccggatagcaggcatttctctgaatgaagaagattcacaggtccc | |
| agtggccccatagtggggcagaagggggctatgctttgacatgga | |
| gctctctcccaggagaggagaagacctcaccagctacaggcctct | |
| gggctgctgccttcctgcagcttttccatggaggaggccaggagt | |
| ggggaggcccggaatggggagcccagtcggctcccagtcggctcc | |
| aagctgtccagtctggcctcaacccgcaagtgtggggatctgggc | |
| ttctatcctgtagggcctggaatacgacgaggctgttactttcac | |
| tttgtggctgtccaaaaaga | |

[0545] Using PROSCAN, (http://bimas.dcrt.nih.gov/molbio/proscan/), no significant promoter was identified in the putative promoter region. However, transcription factor binding sites were identified using a web site at http://motif.genome.ad.jp/, including a SRY (sex-determining region Y gene product) binding sites (134 .140 bp, with numbering according to SEQ ID NO:15,752), and a couple of MZF1 (myeloid zinc finger 1, a negative regulator of CD34 and c-myb, and responsive to retinoic acid) binding sites (1843 .1850 bp and 403-395 bp).

### EXAMPLE 4

### hGDMLP-1 Disease Associations

[0546] Defects in hGDMLP-1 function and/or expression contribute to human disease. Predisposition to such diseases, presence of disease (diagnosis), and monitoring of the course of the disease can therefore be effected using the hGDMLP-1-specific diagnostic compositions and methods provided herein. Accordingly, treatment of such diseases can be effected using the hGDMLP-1-specific therapeutic compositions and methods provided herein.

[0547] Diseases that map to the hGDMLP-1 chromosomal region are shown in Table 3.

TABLE 3
Co-mapping Diseases

| | | map |
|---|---|---|
| OMIM No. | name | location |
| 115470 | cat eye syndrome | 22q11 |
| 217095 | conotruncal cardiac anomalies | 22q11 |
| 192430 | DiGeorge syndrome (2); | 22q11 |
| | Velocardiofacial syndrome | |
| 604364 | Epilepsy, partial, with variable | 22q11-q12 |
| | foci | |
| 600850 | Schizophrenia susceptibility | 22q11-q13 |
| | locus, chromosome 22-related | |
| 155100 | May-Hegglin anomaly | 22q11.2 |
| 153640 | Fechtner syndrome | 22q11.2 |
| 605249 | Sebastian syndrome | 22q11.2 |
| 603622 | Deafness, autosomal dominant 17 | 22q11.2 |
| 145410 | Opitz G syndrome, type II | 22q11.2 |
| 601547 | Cataract, cerulean, type 2 | 22q11.2- |
| | | q12.2 |

[0548] A number of these diseases have physiologic characteristics consistent with alteration of a myosin-like gene, especially a myosin-like gene particularly expressed in human heart.

[0549] Thus, the iris alterations that give cat eye syndrome (CES) its name are frequently associated with heart malformations. A small supernumerary chromosome (smaller than chromosome 21) is present, frequently has 2 centromeres, is bisatellited, and represents an inv dup(22)(q11). No gene candidates have been identified as yet.

[0550] Individuals with 22q11 deletion syndrome (del 22q11) have a range of findings, including congenital heart disease (74% of patients), particularly conotruncal malformations (tetralogy of Fallot, interrupted aortic arch, and truncus arteriosus); palatal abnormalities (69%), particularly velopharyngeal incompetence (VPI), submucosal cleft palate, and cleft palate; characteristic facial features (present in the majority of individuals); and learning difficulties (70-90%).

[0551] DiGeorge syndrome (DGS), most cases of which result from a deletion of chromosome 22q11.2, is characterized by hypocalcemia arising from parathyroid hypoplasia, thymic hypoplasia, and outflow tract defects of the heart. This syndrome has previously been considered to be a contiguous gene deletion, but one or a few genes in the identified locus may play a major role in the pathogenesis of the syndrome's characteristic phenotypic features. Several genes are lost in the characteristic deletion, but definitive identification of the causative genes is lacking.

[0552] Several disorders have been tentatively linked to another myosin-like gene that maps to 22q11, MYH9, although some of these associations are inferential and may be due instead to mutations in hGDMLP-1.

[0553] For example, the autosomal dominant giant-platelet disorders May-Hegglin anomaly, Fechtner syndrome, and Sebastian syndrome share the triad of thrombocytopenia, large platelets, and characteristic leukocyte inclusions. All three disorders may be allelic since May-Hegglin anomaly and Fechtner syndrome map to an overlapping region of 480 kb on chromosome 22. MYH9 was recently identified as a possible candidate gene, since MYH9 is expressed in platelets and is upregulated during granulocyte differentiation, but association of the disease with MYH9 is inferential. Kelley et al., Nature Genetics 26:106-108 (2000).

[0554] Other disorders that map to 22q11 may result from defects of hGDMLP-1, although primary disease manifestions are not in cardiac or skeletal muscle.

[0555] For example, Xiong et al., Am. J. Hum. Genet. 65:1698-1710 (1999), mapped the disease locus for a familial partial epilepsy syndrome with variable foci to an interval on 22q11-q12. The syndrome is characterized by mostly nocturnal seizures arising from frontal, temporal, and occasionally occipital epileptic foci. The syndrome is inherited as an autosomal dominant trait with incomplete penetrance.

[0556] Several studies have suggested that there may be a susceptibility locus for schizophrenia located on chromosome 22. Gill et al., Am. J. Med. Genet. 67:40-5 (1996). Additionally, Pulver et al. (1994) reported a higher incidence of schizophrenia among patients with velocardiofacial syndrome, which is localized to 22q11. Candidate genes have not yet been identified.

[0557] Opitz G syndrome, Opitz et al., Birth Defects Orig. Art. Ser. 2: 95-101 (1969), is characterized by hypertelorism or telecanthus; laryngotracheoesophageal cleft; clefts of lip, palate, and uvula; swallowing difficulty and hoarse cry; genitourinary defects, especially hypospadias in males and splayed labia majora in females; mental retardation; and congenital heart defects. Opitz Syndrome may also be characterized by additional abnormalities, including partial or complete closure of the anal opening (imperforate anus); hypoplasia or agenesis of the corpus callosum; renal abnormalities; heart defects; or mental retardation. Although Opitz G syndrome has been mapped to 22q11.2, no specific genes have been associated with the disease. See, e.g., Robin et al., Am. J. Med. Genet. 62: 305-317 (1996).

[0558] Congenital cataracts are responsible for between 10 and 30% of all cases of blindness in children. One of these congenital forms is cerulean cataract which has been mapped to 22q11.2-22q12.2. The beta-crystallin genes have been identified as possible candidate genes, but no definitive association has been shown.

[0559] In addition, diseases not yet shown to map to the hGDMLP-1 chromosomal locus will be shown to be attributable to hGDMLP-1 defects.

[0560] Diseases of the heart and vascular system are a significant cause of human morbidity and mortality. Increasingly, genetic factors are being found that contribute to predisposition, onset, and/or aggressiveness of most, if not all, of these diseases. Although mutations in single genes have on occasion been identified as causative, these disorders are for the most part believed to have polygenic etiologies.

[0561] For example, cardiovascular disease (CVD), which includes coronary heart disease, stroke, and peripheral arterial vascular disease, is the leading cause of death in the United States and other developed countries. In developing regions, coronary heart disease and stroke are ranked second and third, respectively, as causes of mortality. In the United States alone, about 1 million deaths (about 42% of total deaths per year) result from CVD each year. CVD is also a significant cause of morbidity, with about 1.5 million people suffering myocardial infarction, and about 500,000 suffering strokes in the United States each year. With risk for CVD increasing with age, and an increasingly aging population, CVD will continue to be a major health problem into the future.

[0562] CVD is caused by arterial lesions that begin as fatty streaks, which consist of lipid-laden foam cells, and develop into fibrous plaques. The atherosclerotic plaque may grow slowly, and over several decades may produce a severe stenosis or result in arterial occlusion. Some plaques are stable, but other, more unstable, ones may rupture and induce thrombosis. The thrombi may embolize, rapidly occluding the lumen and leading to myocardial infarction or acute ischemic syndrome.

[0563] Risk factors for CVD include age and gender. In addition, a family history of CVD significantly increases risk, indicating a genetic basis for development of this disease complex. Obesity, especially truncal obesity, the cause of which is suspected to be genetic, is yet another risk factor for CVD. Familial disorders such as hyperlipidemia, hypoalphalipoproteinemia, hypertriglyceridemia, hypercholesterolemia, hyperinsulinemia, homocystinuria, and dysbetalipoproteinemia, all of which lead to lipid or lipoprotein abnormalities, can predispose one to the development of CVD. Both insulin-dependent and non-insulin-dependent diabetes mellitus, both of which have genetic components, have been also linked to the development of atherosclerosis.

[0564] The literature is replete with evidence for genetic causes of cardiovascular diseases. For example, studies by Allayee et al., Am. J. Hum. Genet. 63:577-585(1998), indicated a genetic association between familial combined hyperlipidemia (FCHL) and small dense LDL particles. The studies also concluded that the genetic determinants for LDL particle size are shared, at least in part, among FCHL families and the more general population at risk for CVD. Juo et al., Am. J. Hum. Genet. 63: 586-594 (1998) demonstrated that small, dense LDL particles and elevated apolipoprotein B levels, both of which are commonly found in members of FCHL families, share a common major gene plus individual polygenic components. The common major gene was estimated to explain 37% of the variants of adjusted LDL particle size and 23% of the variants of adjusted apoB levels.

[0565] The atherogenic lipoprotein phenotype (ALP) is a common heritable trait, symptoms of which include a prevalence of small, dense LDL particles, increased levels of triglyceride-rich lipoproteins, reduced levels of high density lipoprotein, and increased risk of CVD, particularly myocardial infarction. Both Nishina et al., Proc. Nat. Acad. Sci. 89: 708-712 (1992) and Rotter et al., Am. J. Hum. Genet. 58: 585-594(1996) demonstrated linkage between ALP and the LDLR locus. Rotter et al., supra, also reported linkage to the CETP locus on chromosome 16 and to the SOD1 locus on chromosome 6, and possibly also to the APOA1/APOC3/APOA4 cluster on chromosome 11.

[0566] Mutations in genes identified as components of lipid metabolism, e.g., apolipoprotein E (apoE) and LDL receptor (LDLR), have been shown to be associated with predisposition to the development of CVD. For example, several apoE variants had been found to be associated with familial dysbetalipoproteinemia, characterized by elevated plasma cholesterol and triglyceride levels and an increased risk for atherosclerosis (de Knijff et al., Mutat 4: 178-194 (1994)). Mutations in the LDLR gene have been associated with the familial hypercholesterolemia, an autosomal dominant disorder characterized by elevation of serum cholesterol bound to low density lipoprotein (LDL), that can lead to increased susceptibility to CVD.

[0567] To date, mutations in numerous genes have been shown to be associated with increased CVD susceptibility. However, the identified genetic associations are believed not to account for all genetic contributions to CVD.

[0568] As yet another example, hypertension is a major health problem because of its high prevalence and its association with increased risk of CVD. Approximately 25% of all adults and over 60% of persons older than 60 years in the United States have high blood pressure.

[0569] Arterial or systemic hypertension is diagnosed when the average of two or more diastolic BP measurements on at least two subsequent visits is 90 mm Hg or more, or when the average of multiple systolic BP readings on two or more subsequent visits is consistently greater than 140 mm Hg. Pulmonary hypertension is defined as pressure within the pulmonary arterial system elevated above the normal range; pulmonary hypertension may lead to right ventricle (RV) failure.

[0570] Hypertension, together with other cardiovascular risk factors, leads to atherosclerosis and other forms of CVD, primarily by damaging the vascular endothelium. In more than 40% of the U.S. population, hypertension is accompanied by hyperlipidemia and leads to the development of atherosclerotic plaques. In the absence of hyperlipidemia, intimal thickening occurs. Non-atherosclerotic hypertension-induced vascular damage can lead to stroke or heart failure.

[0571] Familial diseases associated with secondary hypertension include familial renal disease, polycystic kidney disease, medullary thyroid cancer, pheochromocytoma, and hyperparathyroidism. Hypertension is also twice as common in patients with diabetes mellitus.

[0572] More than 95% of all hypertension cases are essential hypertension, that is, lack identifiable antecedent clinical cause. Essential hypertension shows clustering in families and can result from a variety of genetic diseases. In most cases, high blood pressure results from a complex interaction of factors with both genetic and environmental components. The recent search for genes that contribute to the development of essential hypertension has shown that the disorder is polygenic in origin. However, with several exceptions (such as angiotensinogen, angiotensin receptor-1, beta-3 subunit of guanine nucleotide-binding protein, tumor necrosis factor receptor-2, and α-adducin), the particular genes involved are still being sought.

[0573] Susceptibility loci for essential hypertension have been mapped to chromosomes 17 and 15q. Hasstedt et al., Am. J. Hum. Genet. 43: 14-22 (1988) measured red cell sodium in 1,800 normotensive members of 16 Utah pedigrees ascertained through hypertensive or normotensive probands, siblings with early stroke death, or brothers with early coronary disease, and suggested that red blood cell sodium was determined by 4 alleles at a single locus. This major locus was thought to explain 29% of the variance in red cell sodium, and polygenic inheritance explained another 54.6%. A higher frequency of the high red blood cell sodium genotype in pedigrees in which the proband was hypertensive rather than normotensive provided evidence that this major locus increases susceptibility to hypertension.

[0574] From a study of systolic blood pressure in 278 pedigrees, Perusse et al., Am. J. Hum. Genet. 49: 94-105 (1991) reported that variability in systolic blood pressure is likely influenced by allelic variation of a single gene, with gender and age dependence. They also suggested that a single gene may be associated with a steeper increase of blood pressure with age among males and females.

[0575] There is strong evidence, however, for additional as yet uncharacterized, hypertension-associated loci on other chromosomes.

[0576] For example, Xu et al., Am. J. Hum. Genet. 64: 1694-1701 (1999) carried out a systematic search for chromosomal regions containing genes that regulate blood pressure by scanning the entire autosomal genome using 367 polymorphic markers. Because of the sampling design, the number of sib pairs, and the availability of genotyped parents, this study represented one of the most powerful of its kind. Although no regions achieved a 5% genomewide significance level, maximum lod scores were greater than 2.0 for regions of chromosomes 3, 11, 15, 16, and 17.

[0577] As another example, cardiac arrhythmias account for several thousand deaths each year. Arrhythmias such as ventricular fibrillation, which causes more than 300,000 sudden deaths annually in the United States alone, encompass a multitude of disorders. Another type of arrhythmia, idiopathic dilated cardiomyopathy, of which familial dilated cardiomyopathy accounts for 20-25%, is responsible for more than 10,000 deaths in the United States annually and is the predominant indication for cardiac transplantation.

[0578] Cardiac arrhythmias can be divided into bradyarrhythmias (slowed rhythms) or tachyarrhythmias (speeded rhythms). Bradyarrhythmias result from abnormalities of intrinsic automatic behavior or conduction, primarily within the atrioventricular node and the His-Purkinje's network. Tachyarrhythmias are caused by altered automaticity, reentry, or triggered automaticity.

[0579] Bradyarrhythmias arising from suspected polygenic disorders include Long QT syndrome 4, atrioventricular block, familial sinus node disease, progressive cardiac conduction defect, and familial cardiomyopathy. Tachyarrhythmias with possible underlying polygenic causes include familial ventricular tachycardia, Wolff-Parkinson-White syndrome, familial arrhythmogenic right ventricular dysplasia, heart-hand syndrome V, Mal de Meleda, familial ventricular fibrillation, and familial noncompaction of left ventricular myocardium.

[0580] For some of the arrhythmias, one or more of the causative genes have been identified.

[0581] For example, atrioventricular block has been associated with mutations in the SCN5A gene, as well as mutations in a locus mapped to 19q13. Studies have shown linkage of familial sinus node disease to a marker on 10q22-q24. Familial ventricular tachycardia has been linked to mutations in genes encoding the G protein subunit alpha-i2 (GNAI1), and/or related genes. Examination of families with Wolff-Parkinson-White syndrome suggest an autosomal dominant pattern of inheritance and evidence of linkage of the disorder to DNA markers on band 7q3. Linkage analysis shows strong evidence for localization of a gene for Mal de Meleda disease on 8qter. Familial ventricular fibrillation can be caused by mutations in the cardiac sodium channel gene SCN5A. Familial noncompaction of left ventricular myocardium has been linked to mutations in the gene encoding tafazzin (TAZ), or in the FK506-binding protein 1A gene (FKBP1A).

[0582] Familial dilated cardiomyopathy is characterized by an autosomal dominant pattern of inheritance with age-related penetrance. The linkage of familial dilated cardiomyopathy to several loci indicate that it is polygenic. These loci include CMD1A on 1p11-q11, CMD1B on 9q13, CMD1C on 10q21, CMD1D on 1q32, CMD1E on 3p, CMD1F on 6q, CMD1G on 2q31, CMD1H on 2q14-q22, and CMDLI, which results from mutation in the DES gene on 2q35. In addition, cardiomyopathy can also be caused by mutations in the ACTC gene, the cardiac beta-myosin heavy chain gene (MYH7), or the cardiac troponin T gene.

[0583] Familial arrhythmogenic right ventricular dysplasia is inherited as an autosomal dominant with reduced penetrance and is one of the major genetic causes of juvenile sudden death. It is estimated that the prevalence of familial arrhythmogenic right ventricular dysplasia ranges from 6 per 10,000 in the general population to 4.4 per 1,000 in some areas. Several loci for familial arrhythmogenic right ventricular dysplasia have been mapped indicating that this disease is also polygenic in nature. These loci include ARVD1 on 14q23-q24, ARVD2 on 1q42-q43, ARVD3 on 14q12-q22, ARVD4 on 2q32.1-q32.3, ARVD5 on 3p23, and ARVD6 on 10p14-p12.

[0584] Progressive cardiac conduction defect (PCCD), also called Lenegre-Lev disease, is one of the most common cardiac conduction diseases. It is characterized by progressive alteration of cardiac conduction through the His-Purkinje system with right or left bundle branch block and widening of QRS complexes, leading to complete atrioventricular block and ultimately causing syncope and sudden death. It represents the major cause of pacemaker implantation in the world (0.15 implantations per 1,000 inhabitants per year in developed countries). The cause of PCCD is unknown but familial cases with right bundle branch block have been reported suggesting that at least some cases are of genetic origin. Reports have linked PCCD to HB1 on 19q13.3, and to mutations in the SCN5A gene (Schott et al., Nature Genet. 23: 20-21 (1999)).

[0585] As yet a further example, congenital heart disease occurs at a rate of 8 per 1000 live births, which corresponds to approximately 32,000 infants with newly diagnosed congenital heart disease each year in the United States. Twenty percent of infants with congenital heart disease die within the first year of life. Approximately 80% of the first-year survivors live to reach adulthood. Congenital heart disease also has economic impact due to the estimated 20,000 surgical procedures performed to correct circulatory defects in these patients. The estimated number of adults with congenital heart disease in the United States is currently about 900,000.

[0586] In 90% of patients, congenital heart disease is attributable to multifactorial inheritance. Only 5-10% of malformations are due to primary genetic factors, which are either chromosomal or a result of a single mutant gene.

[0587] The most common congenital heart disease found in adults is bicuspid aortic valve. This defect occurs in 2% of the general population and accounts for approximately 50% of operated cases of aortic stenosis in adults. Atrial septal defect is responsible for 30-40% of congenital heart disease seen in adults. The most common congenital cardiac defect observed in the pediatric population is ventricular septal defect, which accounts for 15-20% of all congenital lesions. Tetralogy of Fallot is the most common cyanotic congenital anomaly observed in adults. Other congenital heart diseases include Eisenmenger's syndrome, patent ductus arteriosus, pulmonary stenosis, coarctation of the aorta, transposition of the great arteries, tricuspid atresia, univentricular heart, Ebstein's anomaly, and double-outlet right ventricle.

[0588] A number of studies have identified putative genetic loci associated with one or more congenital heart diseases.

[0589] Congenital heart disease affects more than 40% of all Down syndrome patients. The candidate chromosomal region containing the putative gene or genes for congenital heart disease associated with Down syndrome is 21q22.2-q22.3, between ETS2 and MX1.

[0590] DiGeorge syndrome (DGS) is characterized by several symptoms including outflow tract defects of the heart such as teratology of Fallot. Most cases result from a deletion of chromosome 22q11.2 (the DiGeorge syndrome chromosome region, or DGCR). The 22q11 deletion is the second most common cause of congenital heart disease after Down syndrome. Several genes are lost in this deletion including the putative transcription factor TUPLE1. This deletion is associated with a variety of phenotypes, e.g., Shprintzen syndrome; conotruncal anomaly face (or Takao syndrome); and isolated outflow tract defects of the heart including Tetralogy of Fallot, truncus arteriosus, and interrupted aortic arch.

[0591] Whereas 90% of cases of DGS may now be attributed to a 22q11 deletion, other associated chromosome defects have been identified. For example, Greenberg et al., Am. J. Hum. Genet. 43:605-611 (1988), reported 1 case of DGS with de110p13 and one with a 18q21.33 deletion. Fukushima et al., Am. J. Hum. Genet. 51 (suppl.):A80 (1992) reported linkage with a deletion of 4q21.3-q25. Gottlieb et al., Am. J. Hum. Genet. 62: 495-498 (1998) concluded that the deletion of more than 1 region on 10p could be associated with the DGS phenotype. The association of the DiGeorge syndrome with at least 2 and possibly more chromosomal locations suggests strongly the involvement of several genes in this disease.

[0592] Digilio et al., J. Med. Genet. 34: 188-190 (1997), calculated empiric risk figures for recurrence of isolated Tetralogy of Fallot in families after exclusion of del(22q11), and concluded that gene(s) different from those located on 22q11 must be involved in causing familial aggregation of nonsyndromic Tetralogy of Fallot. Johnson et al., Am. J. Med. Genet. (1997) conducted a cytogenetic evaluation of 159 cases of Tetralogy of Fallot. They reported that a del(22q11) was identified in 14% who underwent fluorescence in situ hybridization (FISH) testing with the N25 cosmid probe.

[0593] Other congenital heart disease are also suspected to be of polygenic origin. For example, Holmes et al., Birth Defects Orig. Art. Ser. X(4): 228-230 (1974) described familial clustering of hypoplastic left heart syndrome in siblings consistent with multifactorial causation.

[0594] Other significant diseases of the heart and vascular system are also believed to have a genetic, typically polygenic, etiological component. These diseases include, for example, hypoplastic left heart syndrome, cardiac valvular dysplasia, Pfeiffer cardiocranial syndrome, oculofaciocardiodental syndrome, Kapur-Toriello syndrome, Sonoda syndrome, Ohdo Blepharophimosis syndrome, heart-hand syndrome, Pierre-Robin syndrome, Hirschsprung disease, Kousseff syndrome, Grange occlusive arterial syndrome, Kearns-Sayre syndrome, Kartagener syndrome, Alagille syndrome, Ritscher-Schinzel syndrome, Ivemark syndrome, Young-Simpson syndrome, hemochromatosis, Holzgreve syndrome, Barth syndrome, Smith-Lemli-Opitz syndrome, glycogen storage disease, Gaucher-like disease, Fabry disease, Lowry-Maclean syndrome, Rett syndrome, Opitz syndrome, Marfan syndrome, Miller-Dieker lissencephaly syndrome, mucopolysaccharidosis, Bruada syndrome, humerospinal dysostosis, Phaver syndrome, McDonough syndrome, Marfanoid hypermobility syndrome, atransferrinemia, Cornelia de Lange syndrome, Leopard syndrome, Diamond-Blackfan anemia, Steinfeld syndrome, progeria, and Williams-Beuren syndrome.

[0595] hGDMLP-1 defects will be found to contribute to at least some of the aforementioned disorders.

[0596] All patents, patent publications, and other published references mentioned herein are hereby incorporated by reference in their entireties as if each had been individually and specifically incorporated by reference herein. By their citation of various references in this document, applicants do not admit that any particular reference is “prior art” to their invention.

[0597] While specific examples have been provided, the above description is illustrative and not restrictive. Any one or more of the features of the previously described embodiments can be combined in any manner with one or more features of any other embodiments in the present invention. Furthermore, many variations of the invention will become apparent to those skilled in the art upon review of the specification. The scope of the invention should, therefore, be determined by reference to the appended claims, along with their full scope of equivalents.

What is claimed is:

1. An isolated nucleic acid comprising:
(i) the nucleotide sequence of SEQ ID NO:1, (ii) the nucleotide sequence of SEQ ID NO:2, (iii) a nucleotide sequence that is a degenerate variant of the nucleotide sequence of SEQ ID NO:2, (iv) a nucleotide sequence that encodes a polypeptide with the amino acid sequence of SEQ ID NO:3, (v) a nucleotide sequence that encodes a polypeptide with the amino acid sequence of SEQ ID NO:3 with conservative amino acid substitutions; (vi) a nucleotide sequence that encodes a polypeptide with the amino acid sequence of SEQ ID NO:3 with moderately conservative amino acid substitutions, or (vii) a nucleotide sequence that is the complement of the nucleotide sequence of any one of (i)-(vi).

2. An isolated nucleic acid comprising a nucleotide sequence that hybridizes under high stringency conditions to a probe, the sequence of which probe (i) consists of SEQ ID NO:2, (ii) encodes a polypeptide having the sequence of SEQ ID NO:3, (iii) encodes a polypeptide having the sequence of SEQ ID NO:3 with conservative amino acid substitutions, or (iv) is the complement of (i)-(iii), wherein said isolated nucleic acid is nonidentical in sequence to GenBank accession no. AA993492 and is less than 50 kb in length.

3. An isolated nucleic acid comprising a nucleotide sequence that hybridizes under moderate stringency conditions to a probe, the sequence of which probe (i) consists of SEQ ID NO:2, (ii) encodes a polypeptide having the sequence of SEQ ID NO:3, (iii) encodes a polypeptide having the sequence of SEQ ID NO:3 with conservative amino acid substitutions; or (iv) is the complement of (i)-(iii), wherein said isolated nucleic acid is nonidentical in sequence to GenBank accession no. AA993492 and is less than 50 kb in length.

4. An isolated nucleic acid comprising a nucleotide sequence that encodes at least 8 contiguous amino acids of SEQ ID NO:3, wherein said isolated nucleic acid is nonidentical in sequence to GenBank accession no. AA993492 and is less than 50 kb in length.

5. An isolated polynucleotide comprising a fragment of at least 17 nucleotides of the isolated nucleic acid of any one of claims 1-4, wherein said isolated nucleic acid is nonidentical in sequence to GenBank accession no. AA993492 and is less than 50 kb in length.

6. The isolated nucleic acid of any one of claims 1-4, wherein said nucleic acid, or the complement of said nucleic acid, encodes a polypeptide having ATPase activity.

7. The isolated nucleic acid of claim 5, wherein said nucleic acid, or the complement of said nucleic acid, encodes a polypeptide having ATPase activity.

8. The isolated nucleic acid of any one of claims 1-4, wherein said nucleic acid, or the complement of said nucleic acid, encodes a polypeptide capable of binding calmodulin.

9. The isolated nucleic acid of claim 5, wherein said nucleic acid, or the complement of said nucleic acid, encodes a polypeptide capable of binding calmodulin.

10. The isolated nucleic acid of any one of claims 1-4, wherein said nucleic acid, or the complement of said nucleic acid, is expressed in skeletal muscle and heart muscle.

11. The isolated nucleic acid of claim 5, wherein said nucleic acid, or the complement of said nucleic acid, is expressed in skeletal muscle and heart muscle.

12. The isolated nucleic acid molecule of any one of claims 1-4, wherein said nucleic acid molecule is operably linked to one or more expression control elements.

13. The isolated nucleic acid molecule of claim 5, wherein said nucleic acid molecule is operably linked to one or more expression control elements.

14. A replicable vector comprising an isolated nucleic acid molecule of any one of claims 1-4.

15. A replicable vector comprising an isolated nucleic acid molecule of claim 5.

16. The isolated nucleic acid molecule of any one of claims 1-4, attached to a substrate.

17. The isolated nucleic acid molecule of claim 5, attached to a substrate.

18. A host cell transformed to contain the nucleic acid molecule of any one of claims 1-4, or the progeny thereof.

19. A host cell transformed to contain the nucleic acid molecule of claim 5, or the progeny thereof.

20. A method for producing a polypeptide, the method comprising: culturing the host cell of claim 18 under conditions in which the protein encoded by said nucleic acid molecule is expressed.

21. An isolated polypeptide produced by the method of claim 20.

22. An isolated polypeptide selected from the group consisting of: (a) an isolated polypeptide comprising the amino acid sequence of SEQ ID NO:3; (b) an isolated polypeptide comprising a fragment of at least 8 amino acids of SEQ ID NO: 3; (c) an isolated polypeptide according to (a) or (b) in which at least 95% of deviations from the sequence of (a) or (b) are conservative substitutions; and (d) an isolated polypeptide having at least 65% amino acid sequence identity to the isolated polypeptide of (a) or (b).

23. An isolated antibody or antigen-binding fragment or derivative thereof the binding of which can be competitively inhibited by a polypeptide of claim 22.

24. A method of identifying binding partners for a polypeptide according to claim 22, the method comprising:
contacting said polypeptide to a potential binding partner; and
determining if the potential binding partner binds to said polypeptide.

25. The method of claim 24, wherein said contacting is performed in vivo.

26. A method of modulating the expression of a nucleic acid according to claim 1, the method comprising:
administering an effective amount of an agent which changes the expression of a nucleic acid according to claim 1.

27. A method of modulating at least one activity of a polypeptide according to claim 22, the method comprising:
administering an effective amount of an agent which modulates at least one activity of a polypeptide according to claim 21 or 22.

28. A transgenic non-human animal or transgenic plant modified to contain a nucleic acid molecule of any one of claims 1-4.

29. A transgenic non-human animal or transgenic plant modified to contain a nucleic acid molecule of claim 5.

30. A transgenic non-human animal unable to express the endogenous orthologue of the polypeptide of claim 22.

31. A method of diagnosing a disease caused by mutation in human hGDMLP-1, comprising:
detecting said mutation in a sample of nucleic acids that derives from a subject suspected to have said disease.

32. A method of diagnosing or monitoring a disease caused by altered expression of human hGDMLP-1, comprising:
determining the level of expression of human hGDMLP-1 in a sample of nucleic acids or proteins that derives from a subject suspected to have said disease, alterations from a normal level of expression providing diagnostic and/or monitoring information.

33. A pharmaceutical composition comprising the nucleic acid of any one of claims 1-4 and a pharmaceutically acceptable excipient.

34. A pharmaceutical composition comprising the nucleic acid of claim 5.

35. A pharmaceutical composition comprising the polypeptide of claim 22 and a pharmaceutically acceptable excipient.

36. A pharmaceutical composition comprising the antibody or antigen-binding fragment or derivative thereof of claim 23 and a pharmaceutically acceptable excipient.

37. A purified agonist of the polypeptide of claim 22.

38. A purified antagonist of the polypeptide of claim 22.

39. A pharmaceutical composition comprising the agonist of claim 37.

40. A pharmaceutical composition comprising the antagonist of claim 38.

41. A method for treating or preventing a disorder associated with decreased expression or activity of human hGDMLP-1, the method comprising administering to a subject in need of such treatment an effective amount of the pharmaceutical composition of any of claims 33-35 or 37.

42. A method for treating or preventing a disorder associated with increased expression or activity of human hGDMLP-1, the method comprising administering to a subject in need of such treatment an effective amount of the pharmaceutical composition of claim 36 or claim 40.

43. A diagnostic composition comprising the nucleic acid of any one of claims 1-4, said nucleic acid being detectably labeled.

44. A diagnostic composition comprising the nucleic acid of claim 5, said nucleic acid being detectably labeled.

45. A diagnostic composition comprising the polypeptide of claim 22, said polypeptide being detectably labeled.

46. A diagnostic composition comprising the antibody or antigen-binding fragment or derivative thereof of claim 23.

47. The diagnostic composition of claim 46, wherein said antibody or antigen-binding fragment or derivative thereof is detectably labeled.

48. The diagnostic composition of claim 43, wherein said composition is further suitable for in vivo administration.

49. The diagnostic composition of claim 44, wherein said composition is further suitable for in vivo administration.

50. The diagnostic composition of claim 45, wherein said composition is further suitable for in vivo administration.

51. The diagnostic composition of claim 46, wherein said composition is further suitable for in vivo administration.

52. The diagnostic composition of claim 47, wherein said composition is further suitable for in vivo administraiton.

53. A microarray wherein at least one probe of said array is a nucleic acid according to any one of claims 1-4.

54. A microarray wherein at least one probe of said array is a nucleic acid according to claim 5.

55. A method for detecting a target nucleic acid in a sample, said target being a nucleic acid of any one of claims 1-4, the method comprising:
a) hybridizing the sample with a probe comprising at least 30 contiguous nucleotides of a sequence co mplementary to said target nucleic acid in said sample under hybridization conditions sufficient to permit detectable binding of said probe to said target, and
b) detecting the presence or absence, and optionally the amount, of said binding.

56. A method for detecting a target nucleic acid in a sample, said target being a nucleic acid of claim 5, the method comprising:
a) hybridizing the sample with a probe comprising at least 30 contiguous nucleotides of a sequence complementary to said target nucleic acid in said sample under hybridization conditions sufficient to permit detectable binding of said probe to said target, and
b) detecting the presence or absence, and optionally the amount, of said binding.

57. A fusion protein, said fusion protein comprising a polypeptide of claim 22 fused to a heterologous amino acid sequence.

58. The fusion protein of claim 57, wherein said heterologous amino acid sequence is a detectable moiety.

59. The fusion protein of claim 58, wherein said detectable moiety is fluorescent.

60. The fusion protein of claim 57, wherein said heterologous amino acid sequence is an Ig Fc region.

61. A method of screening for agents that modulate the expression of human hGDMLP-1, the method comprising:
contacting a cell or tissue sample believed to express human hGDMLP-1 with a chemical or biological agent, and then
comparing the amount of human hGDMLP-1 expression with that of a control.

The application's sequence listing, which the Patent Office published only in electronic form, follows.

SEQUENCE LISTING (15752 sequences)

SEQ ID NO: 1 - DNA, 8117 bp, Homo sapiens
cacccggggagacgtcttagacagtcgtggttcctgtgatctgtgtcctctttgcagaagttctgtgtccatctcatgtgctgcgtgtgtctgtaaagcctcattccgtgctgtctggcaggaagctccatctcatctcatcatctcacggccctggcactgcctcagcatggccatctcatcacgcctcgccctgtgggagcagaagattcgggaagaggacaagagccctccaccatcctcgccccctcctcttttctctgtcatcccagggggcttcattaagcaactggtccgggggactgaaaaagaggccaaggaagcgagacagaggaagcagttagctgtcgcctctccagaacgagagatcccagaaatttccatcagccaacccaacagcaagtccagcagtggcaccagatctggaagccagcagatctctcaggacgaccagtcaagctctcctgggagctcagacattctgggcaaggagagcgaggggtcccgcagccccgaccctgagcagatgacaagcatcaatggtgagaaggcccaggagctgggctccagtgcgacaccaaccaaaaagactgtccccttcaagaggggcgtgaggaggggtgatgtgttgttgatggtggccaagctggacccggactcagccaagccagagaagactcatccccatgacgcccccccttgcaagacctctccccccgccacagatactggaaaggaaaagaaaggggagacctctaggactccttgtggctcccaggccagcaccgagatcttggccccgaaagctgagaagacccggactgggggtcttggggacccaggccaaggaactgtggcactgaaaaaaggcgaggagggtcaaagcatagtggggaaggggcttgggacccccaagaccacagagctgaaagaggctgagccccagggcaaagacaggcaggggaccaggccccaagcccaagggcccggcgagggggtgcgaccagggaaagcagagaaggagggagcagagcccacaaacacggtggaaaaggggaatgtctctaaggacgtagggagtgaagggaagcacgtaaggccccaaatccctgggagaaagtggggaggtttcctgggaagaaggagtaagtgggacggtccccagaataagaaggacaaagaaggggtgctcttaagtaaggcagagaagacaggtgagcctcagacccagatggagaagacaagccaagtgcagggcgagttgggggacgatctgagaatgggggagaaagcaggtgagcttcggagcacgactgggaaggcaggtgagtcctgggataagaaggaaaagatggggcaaccccagggtaagtccgggaacgcaggtgaagctcggagtcagacagagaagggctgtgaagccccaaaggaggtgagcacaatggtggagtcgccagcagctcctgggaagggaggctggccaggaagccgtgggcaggaagcagaggagccctgctcaagagcaggtgatggggctggtgccctggagacagagctggaaggacccagccagcctgctctggagaaggatgcagaaaggcctcggatacggaaggagaaccaagacgggccagccccgcaggaggagggcaaaggaggccagagcagagactcagaccaggctcctgaggacagatggtatgaggcagagaaagtctggctggctcagaaggatggatttactcttgctacggtgctaaagccagatgagggaacagcagacctgccagcaggaagggtgagactttgcattgatgctgacaaaaccatcactgaggtggatgaggagcatgtccatcgggccaaccctcctgagctggaccaggtcgaggacctggcctctctcatcagtgtcaacgaatccagtgtcctgaacacgcttctgcagcgctacaaagctcagctgctgcacacctgcacagggcctgatctgattgtcctccagccccgggggccctcggtgccttctgcagggaaggtgcccaagggccgccgggatggcctgcctgcccacattggctccatggcacagcgggcatactgggcgctgctgaaccagcggagagaccagagcattgtggccctgggccggagtggcgctgggaagaccacctgctgtgagcaggtcctggaacacctggtggggatggcaggcagtgtggatggcagggtctcagtggagaagatccgagccaccttcactgtcctccgggccttcggctctgtgtccatggcccacagccgcagtgccacccggttctccatggtgatgtcgctggacttcaacgctacaggccgcatcacagctgctcagctccagacaatgcttttggagaagagccgcgtggcacggcagccggaaggggaaagtaacttcctggttttctcccagatgctggctggattggacttggatctcaggacggagctgaacctgcaccagatggcagatagcagctcctttggcatgggcgtgtggtccaagcctgaagataaacagaaggcggcagctgcctttgcccagctccagggtgccatggagatgctgggcatctcagagagcgagcagcgggctgtttggcgggtcctggcagccatctaccacctgggcgcggcgggggcctgcaaagtgggtcggaagcagttcatgaggtttgagtgggcaaactacgcagctgaggccctgggctgcgagtatgaggagctgaacacggccaccttcaagcaccaccttcgacagatcatccagcaaatgacgtttgggccaagccgatggggcctcgaggatgaggaaaccagctcagggctcaagatgacaggagtggactgtgtggaggggatggcctcgggcctgtaccaggaactctttgcggctgtggtctcactcatcaacagatccttttcctcccaccatctctccatggcctccatcatggtggtggactctccaggcttccagaacccccggcaccagggcaaggaccgggcggccacctttgaggagctgtgccacaactacgcccatgagcgcctgcagctgctgttctaccagcggacctttgtctccacgctacagcgatatcaagaggaaggtgttcctgtgcagtttgacctcccggacccctccccagggaccaccgtggctgttgtggatcaaaatccctctcagcaggtccgcttaccagctggaggaggtgcccaggatgccagaggccttttctgggtcttagatgaggaagtccatgtagagggctccagtgacagtgtggtgctcgagcgtctgtgtgctactttcgagaagaaaggagctgggactgaagggtcctctgccctgcggacctgtgagcagcccctccagtgtgagattttccaccagttgggatgggaccctgtgcggtacgacctcacgggctggctccacagagccaagcccaacctctcggccctggatgcaccccaggtcctgcaacagtcaaaaagagaggagctgcggagtctattccaggcccgggccaagctgcctcctgtgtgccgggctgtggcaggcctggagggcacctcccagcaggccctgcagaggagccgcatggtgaggaggacctttgccagcagccttgccgcggtgaggaggaaagccccgtgctcccagatcaagctgcagatggatgcgctgaccagcatgatcaaaaggtcccggctgcactttatccactgcctggtaccaaaccctgtggtggaaagcaggagtgggcaggaatctccaccaccaccgcagcctggtagagacaagcctggggcaggtggacctctggccctggatatcccagcactgagggtccagcttgctgggttccacatcctggaggctctgcgtctgcataggacaggctatgctgaccacatggggctcactcgcttccgccggcaattccaggtgctggacgctccactcctgaagaagctcatgtcgacctccgagggaatagatgaaaggaaggccgtggaggagctcctggagaccctggatctggaaaagaaggcggtggctgtggggcacagccaagtttttctcaaggcaggtgtgatctccaggcttgagaagcagcgagagaagctggtatctcagagcatcgttctcttccaggcggcttgcaagggctttctgtctcgccaggaattcaagaagctgaagattcgccgactggctgcacagtgcatccagaagaatgtggctgtgttcctcgcagtcaaggactggccatggtggcagctgcttggttccctccagcctctacttagtgccaccattggaactgagcagctccgagccaaggaggaggagcttacaacgctaagacggaagctagaaaaatcagagaagttgcggaatgaactccggcagaacacagatctgctagaaagcaagattgctgacttgacctctgaccttgccgatgagcgcttcaaaggtgatgtggcctgccaggtgctggagagtgagcgggcagagcggctacaggccttccgggaggtccaggagctcaagagcaagcatgaacaagtccagaaaaaactgggagatgtgaataaacagttggaagaagcccagcagaaaattcagttgaatgacttggaaagggatcccactggaggagcagacgagtggcagatgcgcttcgactgtgctcagatggagaacgagttcctcagaaagcgtctgcagcaatgcgaggagaggctggactcggagctgacagccaggaaagagctggagcaaaagcttggggagttgcaaagtgcttatgacggggccaagaagatggctcaccaactgaagaggaagtgccaccatcttacctgtgaccttgaggatacctgcgtcctgctagagaaccaacaaagtcgaaaccatgagctggagaagaagcagaagaagtttgacctgcagctggcccaggccctaggtgagtcagtgtttgagaagggtctccgtgagaaagtgacccaggagaacaccagtgtccggtgggagctaggccagcttcagcagcagctgaagcaaaaggagcaggaagcctcacagctgaagcagcaggtggagatgctacaggaccataaacgggagctgctggggtcaccctctctgggggaaaattgcgttgctggcttgaaggagaggctctggaagttggaatccagcgcccttgagcaacagaaaatccagagccagcaggaaaacaccatcaagcagctggagcagctccgccagcggtttgagctggagatcgagcggatgaagcagatgcaccagaaggaccgtgaggaccaggaggaggaactggaggatgtccgtcagtcctgccagaagcggcttcatcagctggaaatgcagctggagcaagagtatgaagagaagcagatggtcctccatgagaagcaagatttggaaggcttgatcggaaccctctgtgaccagattggccatcgggactttgatgtggagaagcgacttcggagagacctcaggaggacacatgcactgttgtcagacgtgcagctccttctgggcaccatggaggatggcaagacatcagtcagcaaggaggagctggagaaagtgcacagccagctggagcagagtgaagccaagtgtgaggaggccttgaagacgcagaaggtgctcacagcggacctggagagcatgcacagcgagctggagaacatgacgcggaacaagagcctggtggatgagcagctgtacaggctgcagtttgagaaggcggacctcctgaagcgcatcgatgaggaccaggatgacctgaatgagctgatgcagaagcacaaggacctcattgctcagtctgctgctgacattgggcagatccaagaactgcagctgcagctggaggaagccaagaaggagaagcacaagctacaagaacaactgcaggtggctcagatgcgcatcgagtacctggaacagtccaccgtggatcgagccatcgtcagcaggcaggaggcggtcatctgtgacctagagaacaagacagagttccagaaggtgcagattaagagatttgaggtcctggtgatccggcttcgggacagcctgatcaagatgggggaggagctttcacaggcggccacctccgagtcccagcagcgggagagcagccagtactaccagcggcgcctggaagagctgaaggccgacatggaagagctggtgcagcgggaggcagaggccagccggcggtgcatggagctggagaagtacgtggaggaacttgcagcagtgaggcaaaccctccagacagacctggagacatccattcggcggattgccgacctgcaggctgccttggaagaagtggcatccagtgacagtgatactgagagtgtccagacggcagtggattgtggcagcagcggccgaaaagagatggataacgtctccatcctcagctcccagccagagggcagcctgcagtcctggttgagctgtactctgtccctggccacagatactatgaggactccttctcgacagtcagccaccagcagccgcatcctcagccccaggataaacgaagaggctggggacactgagaggacccagtcggcattggcactgagcagagcccggtccaccaatgtccacagcaagacctcaggagacaagcctgtttctccccactttgtccgccggcaaaagtactgtcattttggggacggcgaagtgcttgccgtccagagaaagtccacagagagattagaacctgcttcctctcccctggcttctcggagtacaaatacatccccgctgtcgagggaaaagctgcccagtccttcagcggccctctcggagttcgtggaagggctccggaggaagagagcccagagaggccaggggtccacgctgggcctagaggactggcccactctccccatttaccagacgactggggcctccacactaaggaggggcagggctggcagtgacgagggaaacctctcgctgagggttggggcaaagtcacccctggaaatcgaaggggccgctggtggtctcttgaggtccaccagcctcaaatgcatctcttcagacggtgttgggggcacaaccctactccccgaaaagtcgaaaacccaattcagttcctgcgagtccctcttagaatccagaccgagcatggggagaaaactgagctctccgaccacacccagggacatgctgttgtcgcccacactgcgtcctcggaggcggtgtctggagtcctctgtggacgatgcgggctgtccagaccttggaaaggagccgcttgttttccagaaccgccagtttgcccacctgatggaggaacctctaggcagtgacccattcagctggaaactcccaagcctcgactacgaacgcaagaccaaagtggacttcgatgacttcctcccagctatccggaagccccagacacctacctccttggctggatcagccaaaggtgggcaagacggttcacagcgttcaagcatccactttgaaacggaagaggctaaccgttcctttctctcggggatcaagaccattttgaagaagagcccggagcccaaggaggatcccgctcacctgtctgactcgtcctcatcctccggctccatcgtgtccttcaaaagtgctgacagcatcaaaagtcgaccaggaatcccacgacttgcgggtgacggtggcgagcgaacgtcccccgagcggagagagccagggacggggaggaaagacgacgatgttgcgagcataatgaagaaatacctccagaagtaggaaccagttcagcctccttgaagctgcccttgaagacttcccgactctacaataacttggagacagagagactggccaggcctccccggtggccagagccagccagcatggccaccctcaagaggcgagatgagcccacagaggcatatcctgcggggatgctgggctcccagtgtggttggcctgaacaaaataaagtgttgactcctgggcaaaaaaaaaaaaaaaaaaaaaaaaaaaa

SEQ ID NO: 2 - DNA, 7707 bp, Homo sapiens
atggccatctcatcacgcctcgccctgtgggagcagaagattcgggaagaggacaagagccctccaccatcctcgccccctcctcttttctctgtcatcccagggggcttcattaagcaactggtccgggggactgaaaaagaggccaaggaagcgagacagaggaagcagttagctgtcgcctctccagaacgagagatcccagaaatttccatcagccaacccaacagcaagtccagcagtggcaccagatctggaagccagcagatctctcaggacgaccagtcaagctctcctgggagctcagacattctgggcaaggagagcgaggggtcccgcagccccgaccctgagcagatgacaagcatcaatggtgagaaggcccaggagctgggctccagtgcgacaccaaccaaaaagactgtccccttcaagaggggcgtgaggaggggtgatgtgttgttgatggtggccaagctggacccggactcagccaagccagagaagactcatccccatgacgcccccccttgcaagacctctccccccgccacagatactggaaaggaaaagaaaggggagacctctaggactccttgtggctcccaggccagcaccgagatcttggccccgaaagctgagaagacccggactgggggtcttggggacccaggccaaggaactgtggcactgaaaaaaggcgaggagggtcaaagcatagtggggaaggggcttgggacccccaagaccacagagctgaaagaggctgagccccagggcaaagacaggcaggggaccaggccccaagcccaagggcccggcgagggggtgcgaccagggaaagcagagaaggagggagcagagcccacaaacacggtggaaaaggggaatgtctctaaggacgtagggagtgaagggaagcacgtaaggccccaaatccctgggagaaagtggggaggtttcctgggaagaaggagtaagtgggacggtccccagaataagaaggacaaagaaggggtgctcttaagtaaggcagagaagacaggtgagcctcagacccagatggagaagacaagccaagtgcagggcgagttgggggacgatctgagaatgggggagaaagcaggtgagcttcggagcacgactgggaaggcaggtgagtcctgggataagaaggaaaagatggggcaaccccagggtaagtccgggaacgcaggtgaagctcggagtcagacagagaagggctgtgaagccccaaaggaggtgagcacaatggtggagtcgccagcagctcctgggaagggaggctggccaggaagccgtgggcaggaagcagaggagccctgctcaagagcaggtgatggggctggtgccctggagacagagctggaaggacccagccagcctgctctggagaaggatgcagaaaggcctcggatacggaaggagaaccaagacgggccagccccgcaggaggagggcaaaggaggccagagcagagactcagaccaggctcctgaggacagatggtatgaggcagagaaagtctggctggctcagaaggatggatttactcttgctacggtgctaaagccagatgagggaacagcagacctgccagcaggaagggtgagactttgcattgatgctgacaaaaccatcactgaggtggatgaggagcatgtccatcgggccaaccctcctgagctggaccaggtcgaggacctggcctctctcatcagtgtcaacgaatccagtgtcctgaacacgcttctgcagcgctacaaagctcagctgctgcacacctgcacagggcctgatctgattgtcctccagccccgggggccctcggtgccttctgcagggaaggtgcccaagggccgccgggatggcctgcctgcccacattggctccatggcacagcgggcatactgggcgctgctgaaccagcggagagaccagagcattgtggccctgggccggagtggcgctgggaagaccacctgctgtgagcaggtcctggaacacctggtggggatggcaggcagtgtggatggcagggtctcagtggagaagatccgagccaccttcactgtcctccgggccttcggctctgtgtccatggcccacagccgcagtgccacccggttctccatggtgatgtcgctggacttcaacgctacaggccgcatcacagctgctcagctccagacaatgcttttggagaagagccgcgtggcacggcagccggaaggggaaagtaacttcctggttttctcccagatgctggctggattggacttggatctcaggacggagctgaacctgcaccagatggcagatagcagctcctttggcatgggcgtgtggtccaagcctgaagataaacagaaggcggcagctgcctttgcccagctccagggtgccatggagatgctgggcatctcagagagcgagcagcgggctgtttggcgggtcctggcagccatctaccacctgggcgcggcgggggcctgcaaagtgggtcggaagcagttcatgaggtttgagtgggcaaactacgcagctgaggccctgggctgcgagtatgaggagctgaacacggccaccttcaagcaccaccttcgacagatcatccagcaaatgacgtttgggccaagccgatggggcctcgaggatgaggaaaccagctcagggctcaagatgacaggagtggactgtgtggaggggatggcctcgggcctgtaccaggaactctttgcggctgtggtctcactcatcaacagatccttttcctcccaccatctctccatggcctccatcatggtggtggactctccaggcttccagaacccccggcaccagggcaaggaccgggcggccacctttgaggagctgtgccacaactacgcccatgagcgcctgcagctgctgttctaccagcggacctttgtctccacgctacagcgatatcaagaggaaggtgttcctgtgcagtttgacctcccggacccctccccagggaccaccgtggctgttgtggatcaaaatccctctcagcaggtccgcttaccagctggaggaggtgcccaggatgccagaggccttttctgggtcttagatgaggaagtccatgtagagggctccagtgacagtgtggtgctcgagcgtctgtgtgctactttcgagaagaaaggagctgggactgaagggtcctctgccctgcggacctgtgagcagcccctccagtgtgagattttccaccagttgggatgggaccctgtgcggtacgacctcacgggctggctccacagagccaagcccaacctctcggccctggatgcaccccaggtcctgcaacagtcaaaaagagaggagctgcggagtctattccaggcccgggccaagctgcctcctgtgtgccgggctgtggcaggcctggagggcacctcccagcaggccctgcagaggagccgcatggtgaggaggacctttgccagcagccttgccgcggtgaggaggaaagccccgtgctcccagatcaagctgcagatggatgcgctgaccagcatgatcaaaaggtcccggctgcactttatccactgcctggtaccaaaccctgtggtggaaagcaggagtgggcaggaatctccaccaccaccgcagcctggtagagacaagcctggggcaggtggacctctggccctggatatcccagcactgagggtccagcttgctgggttccacatcctggaggctctgcgtctgcataggacaggctatgctgaccacatggggctcactcgcttccgccggcaattccaggtgctggacgctccactcctgaagaagctcatgtcgacctccgagggaatagatgaaaggaaggccgtggaggagctcctggagaccctggatctggaaaagaaggcggtggctgtggggcacagccaagtttttctcaaggcaggtgtgatctccaggcttgagaagcagcgagagaagctggtatctcagagcatcgttctcttccaggcggcttgcaagggctttctgtctcgccaggaattcaagaagctgaagattcgccgactggctgcacagtgcatccagaagaatgtggctgtgttcctcgcagtcaaggactggccatggtggcagctgcttggttccctccagcctctacttagtgccaccattggaactgagcagctccgagccaaggaggaggagcttacaacgctaagacggaagctagaaaaatcagagaagttgcggaatgaactccggcagaacacagatctgctagaaagcaagattgctgacttgacctctgaccttgccgatgagcgcttcaaaggtgatgtggcctgccaggtgctggagagtgagcgggcagagcggctacaggccttccgggaggtccaggagctcaagagcaagcatgaacaagtccagaaaaaactgggagatgtgaataaacagttggaagaagcccagcagaaaattcagttgaatgacttggaaagggatcccactggaggagcagacgagtggcagatgcgcttcgactgtgctcagatggagaacgagttcctcagaaagcgtctgcagcaatgcgaggagaggctggactcggagctgacagccaggaaagagctggagcaaaagcttggggagttgcaaagtgcttatgacggggccaagaagatggctcaccaactgaagaggaagtgccaccatcttacctgtgaccttgaggatacctgcgtcctgctagagaaccaacaaagtcgaaaccatgagctggagaagaagcagaagaagtttgacctgcagctggcccaggccctaggtgagtcagtgtttgagaagggtctccgtgagaaagtgacccaggagaacaccagtgtccggtgggagctaggccagcttcagcagcagctgaagcaaaaggagcaggaagcctcacagctgaagcagcaggtggagatgctacaggaccataaacgggagctgctggggtcaccctctctgggggaaaattgcgttgctggcttgaaggagaggctctggaagttggaatccagcgcccttgagcaacagaaaatccagagccagcaggaaaacaccatcaagcagctggagcagctccgccagcggtttgagctggagatcgagcggatgaagcagatgcaccagaaggaccgtgaggaccaggaggaggaactggaggatgtccgtcagtcctgccagaagcggcttcatcagctggaaatgcagctggagcaagagtatgaagagaagcagatggtcctccatgagaagcaagatttggaaggcttgatcggaaccctctgtgaccagattggccatcgggactttgatgtggagaagcgacttcggagagacctcaggaggacacatgcactgttgtcagacgtgcagctccttctgggcaccatggaggatggcaagacatcagtcagcaaggaggagctggagaaagtgcacagccagctggagcagagtgaagccaagtgtgaggaggccttgaagacgcagaaggtgctcacagcggacctggagagcatgcacagcgagctggagaacatgacgcggaacaagagcctggtggatgagcagctgtacaggctgcagtttgagaaggcggacctcctgaagcgcatcgatgaggaccaggatgacctgaatgagctgatgcagaagcacaaggacctcattgctcagtctgctgctgacattgggcagatccaagaactgcagctgcagctggaggaagccaagaaggagaagcacaagctacaagaacaactgcaggtggctcagatgcgcatcgagtacctggaacagtccaccgtggatcgagccatcgtcagcaggcaggaggcggtcatctgtgacctagagaacaagacagagttccagaaggtgcagattaagagatttgaggtcctggtgatccggcttcgggacagcctgatcaagatgggggaggagctttcacaggcggccacctccgagtcccagcagcgggagagcagccagtactaccagcggcgcctggaagagctgaaggccgacatggaagagctggtgcagcgggaggcagaggccagccggcggtgcatggagctggagaagtacgtggaggaacttgcagcagtgaggcaaaccctccagacagacctggagacatccattcggcggattgccgacctgcaggctgccttggaagaagtggcatccagtgacagtgatactgagagtgtccagacggcagtggattgtggcagcagcggccgaaaagagatggataacgtctccatcctcagctcccagccagagggcagcctgcagtcctggttgagctgtactctgtccctggccacagatactatgaggactccttctcgacagtcagccaccagcagccgcatcctcagccccaggataaacgaagaggctggggacactgagaggacccagtcggcattggcactgagcagagcccggtccaccaatgtccacagcaagacctcaggagacaagcctgtttctccccactttgtccgccggcaaaagtactgtcattttggggacggcgaagtgcttgccgtccagagaaagtccacagagagattagaacctgcttcctctcccctggcttctcggagtacaaatacatccccgctgtcgagggaaaagctgcccagtccttcagcggccctctcggagttcgtggaagggctccggaggaagagagcccagagaggccaggggtccacgctgggcctagaggactggcccactctccccatttaccagacgactggggcctccacactaaggaggggcagggctggcagtgacgagggaaacctctcgctgagggttggggcaaagtcacccctggaaatcgaaggggccgctggtggtctcttgaggtccaccagcctcaaatgcatctcttcagacggtgttgggggcacaaccctactccccgaaaagtcgaaaacccaattcagttcctgcgagtccctcttagaatccagaccgagcatggggagaaaactgagctctccgaccacacccagggacatgctgttgtcgcccacactgcgtcctcggaggcggtgtctggagtcctctgtggacgatgcgggctgtccagaccttggaaaggagccgcttgttttccagaaccgccagtttgcccacctgatggaggaacctctaggcagtgacccattcagctggaaactcccaagcctcgactacgaacgcaagaccaaagtggacttcgatgacttcctcccagctatccggaagccccagacacctacctccttggctggatcagccaaaggtgggcaagacggttcacagcgttcaagcatccactttgaaacggaagaggctaaccgttcctttctctcggggatcaagaccattttgaagaagagcccggagcccaaggaggatcccgctcacctgtctgactcgtcctcatcctccggctccatcgtgtccttcaaaagtgctgacagcatcaaaagtcgaccaggaatcccacgacttgcgggtgacggtggcgagcgaacgtcccccgagcggagagagccagggacggggaggaaagacgacgatgttgcgagcataatgaagaaatacctccagaagtag

SEQ ID NO: 3 - protein, 2568 aa, Homo sapiens [sequence omitted]

SEQ ID NO: 4 - DNA, 2953 bp, Homo sapiens
cacccggggagacgtcttagacagtcgtggttcctgtgatctgtgtcctctttgcagaagttctgtgtccatctcatgtgctgcgtgtgtctgtaaagcctcattccgtgctgtctggcaggaagctccatctcatctcatcatctcacggccctggcactgcctcagcatggccatctcatcacgcctcgccctgtgggagcagaagattcgggaagaggacaagagccctccaccatcctcgccccctcctcttttctctgtcatcccagggggcttcattaagcaactggtccgggggactgaaaaagaggccaaggaagcgagacagaggaagcagttagctgtcgcctctccagaacgagagatcccagaaatttccatcagccaacccaacagcaagtccagcagtggcaccagatctggaagccagcagatctctcaggacgaccagtcaagctctcctgggagctcagacattctgggcaaggagagcgaggggtcccgcagccccgaccctgagcagatgacaagcatcaatggtgagaaggcccaggagctgggctccagtgcgacaccaaccaaaaagactgtccccttcaagaggggcgtgaggaggggtgatgtgttgttgatggtggccaagctggacccggactcagccaagccagagaagactcatccccatgacgcccccccttgcaagacctctccccccgccacagatactggaaaggaaaagaaaggggagacctctaggactccttgtggctcccaggccagcaccgagatcttggccccgaaagctgagaagacccggactgggggtcttggggacccaggccaaggaactgtggcactgaaaaaaggcgaggagggtcaaagcatagtggggaaggggcttgggacccccaagaccacagagctgaaagaggctgagccccagggcaaagacaggcaggggaccaggccccaagcccaagggcccggcgagggggtgcgaccagggaaagcagagaaggagggagcagagcccacaaacacggtggaaaaggggaatgtctctaaggacgtagggagtgaagggaagcacgtaaggccccaaatccctgggagaaagtggggaggtttcctgggaagaaggagtaagtgggacggtccccagaataagaaggacaaagaaggggtgctcttaagtaaggcagagaagacaggtgagcctcagacccagatggagaagacaagccaagtgcagggcgagttgggggacgatctgagaatgggggagaaagcaggtgagcttcggagcacgactgggaaggcaggtgagtcctgggataagaaggaaaagatggggcaaccccagggtaagtccgggaacgcaggtgaagctcggagtcagacagagaagggctgtgaagccccaaaggaggtgagcacaatggtggagtcgccagcagctcctgggaagggaggctggccaggaagccgtgggcaggaagcagaggagccctgctcaagagcaggtgatggggctggtgccctggagacagagctggaaggacccagccagcctgctctggagaaggatgcagaaaggcctcggatacggaaggagaaccaagacgggccagccccgcaggaggagggcaaaggaggccagagcagagactcagaccaggctcctgaggacagatggtatgaggcagagaaagtctggctggctcagaaggatggatttactcttgctacggtgctaaagccagatgagggaacagcagacctgccagcaggaagggtgagactttgcattgatgctgacaaaaccatcactgaggtggatgaggagcatgtccatcgggccaaccctcctgagctggaccaggtcgaggacctggcctctctcatcagtgtcaacgaatccagtgtcctgaacacgcttctgcagcgctacaaagctcagctgctgcacacctgcacagggcctgatctgattgtcctccagccccgggggccctcggtgccttctgcagggaaggtgcccaagggccgccgggatggcctgcctgcccacattggctccatggcacagcgggcatactgggcgctgctgaaccagcggagagaccagagcattgtggccctgggccggagtggcgctgggaagaccacctgctgtgagcaggtcctggaacacctggtggggatggcaggcagtgtggatggcagggtctcagtggagaagatccgagccaccttcactgtcctccgggccttcggctctgtgtccatggcccacagccgcagtgccacccggttctccatggtgatgtcgctggacttcaacgctacaggccgcatcacagctgctcagctccagacaatgcttttggagaagagccgcgtggcacggcagccggaaggggaaagtaacttcctggttttctcccagatgctggctggattggacttggatctcaggacggagctgaacctgcaccagatggcagatagcagctcctttggcatgggcgtgtggtccaagcctgaagataaacagaaggcggcagctgcctttgcccagctccagggtgccatggagatgctgggcatctcagagagcgagcagcgggctgtttggcgggtcctggcagccatctaccacctgggcgcggcgggggcctgcaaagtgggtcggaagcagttcatgaggtttgagtgggcaaactacgcagctgaggccctgggctgcgagtatgaggagctgaacacggccaccttcaagcaccaccttcgacagatcatccagcaaatgacgtttgggccaagccgatggggcctcgaggatgaggaaaccagctcagggctcaagatgacaggagtggactgtgtggaggggatggcctcgggcctgtaccaggaactctttgcggctgtggtctcactcatcaac

SEQ ID NO: 5 - DNA, 4916 bp, Homo sapiens
cccggacccctccccagggaccaccgtggctgttgtggatcaaaatccctctcagcaggtccgcttaccagctggaggaggtgcccaggatgccagaggccttttctgggtcttagatgaggaagtccatgtagagggctccagtgacagtgtggtgctcgagcgtctgtgtgctactttcgagaagaaaggagctgggactgaagggtcctctgccctgcggacctgtgagcagcccctccagtgtgagattttccaccagttgggatgggaccctgtgcggtacgacctcacgggctggctccacagagccaagcccaacctctcggccctggatgcaccccaggtcctgcaacagtcaaaaagagaggagctgcggagtctattccaggcccgggccaagctgcctcctgtgtgccgggctgtggcaggcctggagggcacctcccagcaggccctgcagaggagccgcatggtgaggaggacctttgccagcagccttgccgcggtgaggaggaaagccccgtgctcccagatcaagctgcagatggatgcgctgaccagcatgatcaaaaggtcccggctgcactttatccactgcctggtaccaaaccctgtggtggaaagcaggagtgggcaggaatctccaccaccaccgcagcctggtagagacaagcctggggcaggtggacctctggccctggatatcccagcactgagggtccagcttgctgggttccacatcctggaggctctgcgtctgcataggacaggctatgctgaccacatggggctcactcgcttccgccggcaattccaggtgctggacgctccactcctgaagaagctcatgtcgacctccgagggaatagatgaaaggaaggccgtggaggagctcctggagaccctggatctggaaaagaaggcggtggctgtggggcacagccaagtttttctcaaggcaggtgtgatctccaggcttgagaagcagcgagagaagctggtatctcagagcatcgttctcttccaggcggcttgcaagggctttctgtctcgccaggaattcaagaagctgaagattcgccgactggctgcacagtgcatccagaagaatgtggctgtgttcctcgcagtcaaggactggccatggtggcagctgcttggttccctccagcctctacttagtgccaccattggaactgagcagctccgagccaaggaggaggagcttacaacgctaagacggaagctagaaaaatcagagaagttgcggaatgaactccggcagaacacagatctgctagaaagcaagattgctgacttgacctctgaccttgccgatgagcgcttcaaaggtgatgtggcctgccaggtgctggagagtgagcgggcagagcggctacaggccttccgggaggtccaggagctcaagagcaagcatgaacaagtccagaaaaaactgggagatgtgaataaacagttggaagaagcccagcagaaaattcagttgaatgacttggaaagggatcccactggaggagcagacgagtggcagatgcgcttcgactgtgctcagatggagaacgagttcctcagaaagcgtctgcagcaatgcgaggagaggctggactcggagctgacagccaggaaagagctggagcaaaagcttggggagttgcaaagtgcttatgacggggccaagaagatggctcaccaactgaagaggaagtgccaccatcttacctgtgaccttgaggatacctgcgtcctgctagagaaccaacaaagtcgaaaccatgagctggagaagaagcagaagaagtttgacctgcagctggcccaggccctaggtgagtcagtgtttgagaagggtctccgtgagaaagtgacccaggagaacaccagtgtccggtgggagctaggccagcttcagcagcagctgaagcaaaaggagcaggaagcctcacagctgaagcagcaggtggagatgctacaggaccataaacgggagctgctggggtcaccctctctgggggaaaattgcgttgctggcttgaaggagaggctctggaagttggaatccagcgcccttgagcaacagaaaatccagagccagcaggaaaacaccatcaagcagctggagcagctccgccagcggtttgagctggagatcgagcggatgaagcagatgcaccagaaggaccgtgaggaccaggaggaggaactggaggatgtccgtcagtcctgccagaagcggcttcatcagctggaaatgcagctggagcaagagtatgaagagaagcagatggtcctccatgagaagcaagatttggaaggcttgatcggaaccctctgtgaccagattggccatcgggactttgatgtggagaagcgacttcggagagacctcaggaggacacatgcactgttgtcagacgtgcagctccttctgggcaccatggaggatggcaagacatcagtcagcaaggaggagctggagaaagtgcacagccagctggagcagagtgaagccaagtgtgaggaggccttgaagacgcagaaggtgctcacagcggacctggagagcatgcacagcgagctggagaacatgacgcggaacaagagcctggtggatgagcagctgtacaggctgcagtttgagaaggcggacctcctgaagcgcatcgatgaggaccaggatgacctgaatgagctgatgcagaagcacaaggacctcattgctcagtctgctgctgacattgggcagatccaagaactgcagctgcagctggaggaagccaagaaggagaagcacaagctacaagaacaactgcaggtggctcagatgcgcatcgagtacctggaacagtccaccgtggatcgagccatcgtcagcaggcaggaggcggtcatctgtgacctagagaacaagacagagttccagaaggtgcagattaagagatttgaggtcctggtgatccggcttcgggacagcctgatcaagatgggggaggagctttcacaggcggccacctccgagtcccagcagcgggagagcagccagtactaccagcggcgcctggaagagctgaaggccgacatggaagagctggtgcagcgggaggcagaggccagccggcggtgcatggagctggagaagtacgtggaggaacttgcagcagtgaggcaaaccctccagacagacctggagacatccattcggcggattgccgacctgcaggctgccttggaagaagtggcatccagtgacagtgatactgagagtgtccagacggcagtggattgtggcagcagcggccgaaaagagatggataacgtctccatcctcagctcccagccagagggcagcctgcagtcctggttgagctgtactctgtccctggccacagatactatgaggactccttctcgacagtcagccaccagcagccgcatcctcagccccaggataaacgaagaggctggggacactgagaggacccagtcggcattggcactgagcagagcccggtccaccaatgtccacagcaagacctcaggagacaagcctgtttctccccactttgtccgccggcaaaagtactgtcattttggggacggcgaagtgcttgccgtccagagaaagtccacagagagattagaacctgcttcctctcccctggcttctcggagtacaaatacatccccgctgtcgagggaaaagctgcccagtccttcagcggccctctcggagttcgtggaagggctccggaggaagagagcccagagaggccaggggtccacgctgggcctagaggactggcccactctccccatttaccagacgactggggcctccacactaaggaggggcagggctggcagtgacgagggaaacctctcgctgagggttggggcaaagtcacccctggaaatcgaaggggccgctggtggtctcttgaggtccaccagcctcaaatgcatctcttcagacggtgttgggggcacaaccctactccccgaaaagtcgaaaacccaattcagttcctgcgagtccctcttagaatccagaccgagcatggggagaaaactgagctctccgaccacacccagggacatgctgttgtcgcccacactgcgtcctcggaggcggtgtctggagtcctctgtggacgatgcgggctgtccagaccttggaaaggagccgcttgttttccagaaccgccagtttgcccacctgatggaggaacctctaggcagtgacccattcagctggaaactcccaagcctcgactacgaacgcaagaccaaagtggacttcgatgacttcctcccagctatccggaagccccagacacctacctccttggctggatcagccaaaggtgggcaagacggttcacagcgttcaagcatccactttgaaacggaagaggctaaccgttcctttctctcggggatcaagaccattttgaagaagagcccggagcccaaggaggatcccgctcacctgtctgactcgtcctcatcctccggctccatcgtgtccttcaaaagtgctgacagcatcaaaagtcgaccaggaatcccacgacttgcgggtgacggtggcgagcgaacgtcccccgagcggagagagccagggacggggaggaaagacgacgatgttgcgagcataatgaagaaatacctccagaagtaggaaccagttcagcctccttgaagctgcccttgaagacttcccgactctacaataacttggagacagagagactggccaggcctccccggtggccagagccagccagcatggccaccctcaagaggcgagatgagcccacagaggcatatcctgcggggatgctgggctcccagtgtggttggcctgaacaaaataaagtgttgactcctgggca

SEQ ID NO: 6 - DNA, 17 bp, Homo sapiens
cacccggggagacgtct

SEQ ID NO: 7 - DNA, 17 bp, Homo sapiens
acccggggagacgtctt

SEQ ID NO: 8 - DNA, 17 bp, Homo sapiens
cccggggagacgtctta

SEQ ID NO: 9 - DNA, 17 bp, Homo sapiens
ccggggagacgtcttag

SEQ ID NO: 10 - DNA, 17 bp, Homo sapiens
cggggagacgtcttaga

SEQ ID NO: 11 - DNA, 17 bp, Homo sapiens
ggggagacgtcttagac

SEQ ID NO: 12 - DNA, 17 bp, Homo sapiens
gggagacgtcttagaca

SEQ ID NO: 13 - DNA, 17 bp, Homo sapiens
ggagacgtcttagacag

SEQ ID NO: 14 - DNA, 17 bp, Homo sapiens
gagacgtcttagacagt

SEQ ID NO: 15 - DNA, 17 bp, Homo sapiens
agacgtcttagacagtc

SEQ ID NO: 16 - DNA, 17 bp, Homo sapiens
gacgtcttagacagtcg

SEQ ID NO: 17 - DNA, 17 bp, Homo sapiens
acgtcttagacagtcgt

SEQ ID NO: 18 - DNA, 17 bp, Homo sapiens
cgtcttagacagtcgtg

SEQ ID NO: 19 - DNA, 17 bp, Homo sapiens
gtcttagacagtcgtgg

SEQ ID NO: 20 - DNA, 17 bp, Homo sapiens
tcttagacagtcgtggt

SEQ ID NO: 21 - DNA, 17 bp, Homo sapiens
cttagacagtcgtggtt

SEQ ID NO: 22 - DNA, 17 bp, Homo sapiens
ttagacagtcgtggttc

SEQ ID NO: 23 - DNA, 17 bp, Homo sapiens
tagacagtcgtggttcc

SEQ ID NO: 24 - DNA, 17 bp, Homo sapiens
agacagtcgtggttcct

SEQ ID NO: 25 - DNA, 17 bp, Homo sapiens
gacagtcgtggttcctg

SEQ ID NO: 26 - DNA, 17 bp, Homo sapiens
acagtcgtggttcctgt

SEQ ID NO: 27 - DNA, 17 bp, Homo sapiens
cagtcgtggttcctgtg

SEQ ID NO: 28 - DNA, 17 bp, Homo sapiens
agtcgtggttcctgtga

SEQ ID NO: 29 - DNA, 17 bp, Homo sapiens
gtcgtggttcctgtgat

SEQ ID NO: 30 - DNA, 17 bp, Homo sapiens
tcgtggttcctgtgatc

SEQ ID NO: 31 - DNA, 17 bp, Homo sapiens
cgtggttcctgtgatct

SEQ ID NO: 32 - DNA, 17 bp, Homo sapiens
gtggttcctgtgatctg

SEQ ID NO: 33 - DNA, 17 bp, Homo sapiens
tggttcctgtgatctgt

SEQ ID NO: 34 - DNA, 17 bp, Homo sapiens
ggttcctgtgatctgtg

SEQ ID NO: 35 - DNA, 17 bp, Homo sapiens
gttcctgtgatctgtgt

SEQ ID NO: 36 - DNA, 17 bp, Homo sapiens
ttcctgtgatctgtgtc

SEQ ID NO: 37 - DNA, 17 bp, Homo sapiens
tcctgtgatctgtgtcc

SEQ ID NO: 38 - DNA, 17 bp, Homo sapiens
cctgtgatctgtgtcct

SEQ ID NO: 39 - DNA, 17 bp, Homo sapiens
ctgtgatctgtgtcctc

SEQ ID NO: 40 - DNA, 17 bp, Homo sapiens
tgtgatctgtgtcctct

SEQ ID NO: 41 - DNA, 17 bp, Homo sapiens
gtgatctgtgtcctctt

SEQ ID NO: 42 - DNA, 17 bp, Homo sapiens
tgatctgtgtcctcttt

SEQ ID NO: 43 - DNA, 17 bp, Homo sapiens
gatctgtgtcctctttg

SEQ ID NO: 44 - DNA, 17 bp, Homo sapiens
atctgtgtcctctttgc

SEQ ID NO: 45 - DNA, 17 bp, Homo sapiens
tctgtgtcctctttgca

SEQ ID NO: 46 - DNA, 17 bp, Homo sapiens
ctgtgtcctctttgcag

SEQ ID NO: 47 - DNA, 17 bp, Homo sapiens
tgtgtcctctttgcaga

SEQ ID NO: 48 - DNA, 17 bp, Homo sapiens
gtgtcctctttgcagaa

SEQ ID NO: 49 - DNA, 17 bp, Homo sapiens
tgtcctctttgcagaag

SEQ ID NO: 50 - DNA, 17 bp, Homo sapiens
gtcctctttgcagaagt

SEQ ID NO: 51 - DNA, 17 bp, Homo sapiens
tcctctttgcagaagtt

SEQ ID NO: 52 - DNA, 17 bp, Homo sapiens
cctctttgcagaagttc

SEQ ID NO: 53 - DNA, 17 bp, Homo sapiens
ctctttgcagaagttct

SEQ ID NO: 54 - DNA, 17 bp, Homo sapiens
tctttgcagaagttctg

SEQ ID NO: 55 - DNA, 17 bp, Homo sapiens
ctttgcagaagttctgt

SEQ ID NO: 56 - DNA, 17 bp, Homo sapiens
tttgcagaagttctgtg

SEQ ID NO: 57 - DNA, 17 bp, Homo sapiens
ttgcagaagttctgtgt

SEQ ID NO: 58 - DNA, 17 bp, Homo sapiens
tgcagaagttctgtgtc

SEQ ID NO: 59 - DNA, 17 bp, Homo sapiens
gcagaagttctgtgtcc

SEQ ID NO: 60 - DNA, 17 bp, Homo sapiens
cagaagttctgtgtcca

SEQ ID NO: 61 - DNA, 17 bp, Homo sapiens
agaagttctgtgtccat

SEQ ID NO: 62 - DNA, 17 bp, Homo sapiens
gaagttctgtgtccatc

SEQ ID NO: 63 - DNA, 17 bp, Homo sapiens
aagttctgtgtccatct

SEQ ID NO: 64 - DNA, 17 bp, Homo sapiens
agttctgtgtccatctc

SEQ ID NO: 65 - DNA, 17 bp, Homo sapiens
gttctgtgtccatctca

SEQ ID NO: 66 - DNA, 17 bp, Homo sapiens
ttctgtgtccatctcat

SEQ ID NO: 67 - DNA, 17 bp, Homo sapiens
tctgtgtccatctcatg

SEQ ID NO: 68 - DNA, 17 bp, Homo sapiens
ctgtgtccatctcatgt

SEQ ID NO: 69 - DNA, 17 bp, Homo sapiens
tgtgtccatctcatgtg

SEQ ID NO: 70 - DNA, 17 bp, Homo sapiens
gtgtccatctcatgtgc

SEQ ID NO: 71 - DNA, 17 bp, Homo sapiens
tgtccatctcatgtgct

SEQ ID NO: 72 - DNA, 17 bp, Homo sapiens
gtccatctcatgtgctg

SEQ ID NO: 73 - DNA, 17 bp, Homo sapiens
tccatctcatgtgctgc

SEQ ID NO: 74 - DNA, 17 bp, Homo sapiens
ccatctcatgtgctgcg

SEQ ID NO: 75 - DNA, 17 bp, Homo sapiens
catctcatgtgctgcgt

SEQ ID NO: 76 - DNA, 17 bp, Homo sapiens
atctcatgtgctgcgtg

SEQ ID NO: 77 - DNA, 17 bp, Homo sapiens
tctcatgtgctgcgtgt

SEQ ID NO: 78 - DNA, 17 bp, Homo sapiens
ctcatgtgctgcgtgtg

SEQ ID NO: 79 - DNA, 17 bp, Homo sapiens
tcatgtgctgcgtgtgt

SEQ ID NO: 80 - DNA, 17 bp, Homo sapiens
catgtgctgcgtgtgtc

SEQ ID NO: 81 - DNA, 17 bp, Homo sapiens
atgtgctgcgtgtgtct

SEQ ID NO: 82 - DNA, 17 bp, Homo sapiens
tgtgctgcgtgtgtctg

SEQ ID NO: 83 - DNA, 17 bp, Homo sapiens
gtgctgcgtgtgtctgt

SEQ ID NO: 84 - DNA, 17 bp, Homo sapiens
tgctgcgtgtgtctgta

SEQ ID NO: 85 - DNA, 17 bp, Homo sapiens
gctgcgtgtgtctgtaa

SEQ ID NO: 86 - DNA, 17 bp, Homo sapiens
ctgcgtgtgtctgtaaa

SEQ ID NO: 87 - DNA, 17 bp, Homo sapiens
tgcgtgtgtctgtaaag

SEQ ID NO: 88 - DNA, 17 bp, Homo sapiens
gcgtgtgtctgtaaagc

SEQ ID NO: 89 - DNA, 17 bp, Homo sapiens
cgtgtgtctgtaaagcc

SEQ ID NO: 90 - DNA, 17 bp, Homo sapiens
gtgtgtctgtaaagcct

SEQ ID NO: 91 - DNA, 17 bp, Homo sapiens
tgtgtctgtaaagcctc

SEQ ID NO: 92 - DNA, 17 bp, Homo sapiens
gtgtctgtaaagcctca

SEQ ID NO: 93 - DNA, 17 bp, Homo sapiens
tgtctgtaaagcctcat

SEQ ID NO: 94 - DNA, 17 bp, Homo sapiens
gtctgtaaagcctcatt

SEQ ID NO: 95 - DNA, 17 bp, Homo sapiens
tctgtaaagcctcattc

SEQ ID NO: 96 - DNA, 17 bp, Homo sapiens
ctgtaaagcctcattcc

SEQ ID NO: 97 - DNA, 17 bp, Homo sapiens
tgtaaagcctcattccg

SEQ ID NO: 98 - DNA, 17 bp, Homo sapiens
gtaaagcctcattccgt

SEQ ID NO: 99 - DNA, 17 bp, Homo sapiens
taaagcctcattccgtg

SEQ ID NO: 100 - DNA, 17 bp, Homo sapiens
aaagcctcattccgtgc

SEQ ID NO: 101 - DNA, 17 bp, Homo sapiens
aagcctcattccgtgct

SEQ ID NO: 102 - DNA, 17 bp, Homo sapiens
agcctcattccgtgctg

SEQ ID NO: 103 - DNA, 17 bp, Homo sapiens
gcctcattccgtgctgt

SEQ ID NO: 104 - DNA, 17 bp, Homo sapiens
cctcattccgtgctgtc

SEQ ID NO: 105 - DNA, 17 bp, Homo sapiens
ctcattccgtgctgtct

SEQ ID NO: 106 - DNA, 17 bp, Homo sapiens
tcattccgtgctgtctg

SEQ ID NO: 107 - DNA, 17 bp, Homo sapiens
cattccgtgctgtctgg

SEQ ID NO: 108 - DNA, 17 bp, Homo sapiens
attccgtgctgtctggc

SEQ ID NO: 109 - DNA, 17 bp, Homo sapiens
ttccgtgctgtctggca

SEQ ID NO: 110 - DNA, 17 bp, Homo sapiens
tccgtgctgtctggcag

SEQ ID NO: 111 - DNA, 17 bp, Homo sapiens
ccgtgctgtctggcagg

SEQ ID NO: 112 - DNA, 17 bp, Homo sapiens
cgtgctgtctggcagga

SEQ ID NO: 113 - DNA, 17 bp, Homo sapiens
gtgctgtctggcaggaa

SEQ ID NO: 114 - DNA, 17 bp, Homo sapiens
tgctgtctggcaggaag

SEQ ID NO: 115 - DNA, 17 bp, Homo sapiens
gctgtctggcaggaagc

SEQ ID NO: 116 - DNA, 17 bp, Homo sapiens
ctgtctggcaggaagct

SEQ ID NO: 117 - DNA, 17 bp, Homo sapiens
tgtctggcaggaagctc

SEQ ID NO: 118 - DNA, 17 bp, Homo sapiens
gtctggcaggaagctcc

SEQ ID NO: 119 - DNA, 17 bp, Homo sapiens
tctggcaggaagctcca

SEQ ID NO: 120 - DNA, 17 bp, Homo sapiens
ctggcaggaagctccat

SEQ ID NO: 121 - DNA, 17 bp, Homo sapiens
tggcaggaagctccatc

SEQ ID NO: 122 - DNA, 17 bp, Homo sapiens
ggcaggaagctccatct

SEQ ID NO: 123 - DNA, 17 bp, Homo sapiens
gcaggaagctccatctc

SEQ ID NO: 124 - DNA, 17 bp, Homo sapiens
caggaagctccatctca

SEQ ID NO: 125 - DNA, 17 bp, Homo sapiens
aggaagctccatctcat

SEQ ID NO: 126 - DNA, 17 bp, Homo sapiens
ggaagctccatctcatc

SEQ ID NO: 127 - DNA, 17 bp, Homo sapiens
gaagctccatctcatct

SEQ ID NO: 128 - DNA, 17 bp, Homo sapiens
aagctccatctcatctc

SEQ ID NO: 129 - DNA, 17 bp, Homo sapiens
agctccatctcatctca

SEQ ID NO: 130 - DNA, 17 bp, Homo sapiens
gctccatctcatctcat

SEQ ID NO: 131 - DNA, 17 bp, Homo sapiens
ctccatctcatctcatc

SEQ ID NO: 132 - DNA, 17 bp, Homo sapiens
tccatctcatctcatca

SEQ ID NO: 133 - DNA, 17 bp, Homo sapiens
ccatctcatctcatcat

SEQ ID NO: 134 - DNA, 17 bp, Homo sapiens
catctcatctcatcatc

SEQ ID NO: 135 - DNA, 17 bp, Homo sapiens
atctcatctcatcatct

SEQ ID NO: 136 - DNA, 17 bp, Homo sapiens
tctcatctcatcatctc

SEQ ID NO: 137 - DNA, 17 bp, Homo sapiens
ctcatctcatcatctca

SEQ ID NO: 138 - DNA, 17 bp, Homo sapiens
tcatctcatcatctcac

SEQ ID NO: 139 - DNA, 17 bp, Homo sapiens
catctcatcatctcacg

SEQ ID NO: 140 - DNA, 17 bp, Homo sapiens
atctcatcatctcacgg

SEQ ID NO: 141 - DNA, 17 bp, Homo sapiens
tctcatcatctcacggc

SEQ ID NO: 142 - DNA, 17 bp, Homo sapiens
ctcatcatctcacggcc

SEQ ID NO: 143 - DNA, 17 bp, Homo sapiens
tcatcatctcacggccc

SEQ ID NO: 144 - DNA, 17 bp, Homo sapiens
catcatctcacggccct

SEQ ID NO: 145 - DNA, 17 bp, Homo sapiens
atcatctcacggccctg

SEQ ID NO: 146 - DNA, 17 bp, Homo sapiens
tcatctcacggccctgg

SEQ ID NO: 147 - DNA, 17 bp, Homo sapiens
catctcacggccctggc

SEQ ID NO: 148 - DNA, 17 bp, Homo sapiens
atctcacggccctggca

SEQ ID NO: 149 - DNA, 17 bp, Homo sapiens
tctcacggccctggcac

SEQ ID NO: 150 - DNA, 17 bp, Homo sapiens
ctcacggccctggcact

SEQ ID NO: 151 - DNA, 17 bp, Homo sapiens
tcacggccctggcactg

SEQ ID NO: 152 - DNA, 17 bp, Homo sapiens
cacggccctggcactgc

SEQ ID NO: 153 - DNA, 17 bp, Homo sapiens
acggccctggcactgcc

SEQ ID NO: 154 - DNA, 17 bp, Homo sapiens
cggccctggcactgcct

SEQ ID NO: 155 - DNA, 17 bp, Homo sapiens
ggccctggcactgcctc

SEQ ID NO: 156 - DNA, 17 bp, Homo sapiens
gccctggcactgcctca

SEQ ID NO: 157 - DNA, 17 bp, Homo sapiens
ccctggcactgcctcag

SEQ ID NO: 158 - DNA, 17 bp, Homo sapiens
cctggcactgcctcagc

SEQ ID NO: 159 - DNA, 17 bp, Homo sapiens
ctggcactgcctcagca

SEQ ID NO: 160 - DNA, 17 bp, Homo sapiens
tggcactgcctcagcat

SEQ ID NO: 161 - DNA, 17 bp, Homo sapiens
ggcactgcctcagcatg

SEQ ID NO: 162 - DNA, 17 bp, Homo sapiens
gcactgcctcagcatgg

SEQ ID NO: 163 - DNA, 17 bp, Homo sapiens
cactgcctcagcatggc

SEQ ID NO: 164 - DNA, 17 bp, Homo sapiens
actgcctcagcatggcc

SEQ ID NO: 165 - DNA, 17 bp, Homo sapiens
ctgcctcagcatggcca

SEQ ID NO: 166 - DNA, 17 bp, Homo sapiens
tgcctcagcatggccat

SEQ ID NO: 167 - DNA, 17 bp, Homo sapiens
gcctcagcatggccatc

SEQ ID NO: 168 - DNA, 17 bp, Homo sapiens
cctcagcatggccatct

SEQ ID NO: 169 - DNA, 17 bp, Homo sapiens
ctcagcatggccatctc

SEQ ID NO: 170 - DNA, 17 bp, Homo sapiens
tcagcatggccatctca

SEQ ID NO: 171 - DNA, 17 bp, Homo sapiens
cagcatggccatctcat

SEQ ID NO: 172 - DNA, 17 bp, Homo sapiens
agcatggccatctcatc

SEQ ID NO: 173 - DNA, 17 bp, Homo sapiens
gcatggccatctcatca

SEQ ID NO: 174 - DNA, 17 bp, Homo sapiens
catggccatctcatcac

SEQ ID NO: 175 - DNA, 17 bp, Homo sapiens
atggccatctcatcacg

SEQ ID NO: 176 - DNA, 17 bp, Homo sapiens
tggccatctcatcacgc

SEQ ID NO: 177 - DNA, 17 bp, Homo sapiens
ggccatctcatcacgcc

SEQ ID NO: 178 - DNA, 17 bp, Homo sapiens
gccatctcatcacgcct

SEQ ID NO: 179 - DNA, 17 bp, Homo sapiens
ccatctcatcacgcctc

SEQ ID NO: 180 - DNA, 17 bp, Homo sapiens
catctcatcacgcctcg

SEQ ID NO: 181 - DNA, 17 bp, Homo sapiens
atctcatcacgcctcgc

SEQ ID NO: 182 - DNA, 17 bp, Homo sapiens
tctcatcacgcctcgcc

SEQ ID NO: 183 - DNA, 17 bp, Homo sapiens
ctcatcacgcctcgccc

SEQ ID NO: 184 - DNA, 17 bp, Homo sapiens
tcatcacgcctcgccct

SEQ ID NO: 185 - DNA, 17 bp, Homo sapiens
catcacgcctcgccctg

SEQ ID NO: 186 - DNA, 17 bp, Homo sapiens
atcacgcctcgccctgt

SEQ ID NO: 187 - DNA, 17 bp, Homo sapiens
tcacgcctcgccctgtg

SEQ ID NO: 188 - DNA, 17 bp, Homo sapiens
cacgcctcgccctgtgg

SEQ ID NO: 189 - DNA, 17 bp, Homo sapiens
acgcctcgccctgtggg

SEQ ID NO: 190 - DNA, 17 bp, Homo sapiens
cgcctcgccctgtggga

SEQ ID NO: 191 - DNA, 17 bp, Homo sapiens
gcctcgccctgtgggag

SEQ ID NO: 192 - DNA, 17 bp, Homo sapiens
cctcgccctgtgggagc

SEQ ID NO: 193 - DNA, 17 bp, Homo sapiens
ctcgccctgtgggagca

SEQ ID NO: 194 - DNA, 17 bp, Homo sapiens
tcgccctgtgggagcag

SEQ ID NO: 195 - DNA, 17 bp, Homo sapiens
cgccctgtgggagcaga

SEQ ID NO: 196 - DNA, 17 bp, Homo sapiens
gccctgtgggagcagaa

SEQ ID NO: 197 - DNA, 17 bp, Homo sapiens
ccctgtgggagcagaag

SEQ ID NO: 198 - DNA, 17 bp, Homo sapiens
cctgtgggagcagaaga

SEQ ID NO: 199 - DNA, 17 bp, Homo sapiens
ctgtgggagcagaagat

SEQ ID NO: 200 - DNA, 17 bp, Homo sapiens
tgtgggagcagaagatt

SEQ ID NO: 201 - DNA, 17 bp, Homo sapiens
gtgggagcagaagattc

SEQ ID NO: 202 - DNA, 17 bp, Homo sapiens
tgggagcagaagattcg

SEQ ID NO: 203 - DNA, 17 bp, Homo sapiens
gggagcagaagattcgg

SEQ ID NO: 204 - DNA, 17 bp, Homo sapiens
ggagcagaagattcggg

SEQ ID NO: 205 - DNA, 17 bp, Homo sapiens
gagcagaagattcggga

SEQ ID NO: 206 - DNA, 17 bp, Homo sapiens
agcagaagattcgggaa

SEQ ID NO: 207 - DNA, 17 bp, Homo sapiens
gcagaagattcgggaag

SEQ ID NO: 208 - DNA, 17 bp, Homo sapiens
cagaagattcgggaaga

SEQ ID NO: 209 - DNA, 17 bp, Homo sapiens
agaagattcgggaagag

SEQ ID NO: 210 - DNA, 17 bp, Homo sapiens
gaagattcgggaagagg

SEQ ID NO: 211 - DNA, 17 bp, Homo sapiens
aagattcgggaagagga

SEQ ID NO: 212 - DNA, 17 bp, Homo sapiens
agattcgggaagaggac

SEQ ID NO: 213 - DNA, 17 bp, Homo sapiens
gattcgggaagaggaca

SEQ ID NO: 214 - DNA, 17 bp, Homo sapiens
attcgggaagaggacaa

SEQ ID NO: 215 - DNA, 17 bp, Homo sapiens
ttcgggaagaggacaag

SEQ ID NO: 216 - DNA, 17 bp, Homo sapiens
tcgggaagaggacaaga

SEQ ID NO: 217 - DNA, 17 bp, Homo sapiens
cgggaagaggacaagag

SEQ ID NO: 218 - DNA, 17 bp, Homo sapiens
gggaagaggacaagagc

SEQ ID NO: 219 - DNA, 17 bp, Homo sapiens
ggaagaggacaagagcc

SEQ ID NO: 220 - DNA, 17 bp, Homo sapiens
gaagaggacaagagccc

SEQ ID NO: 221 - DNA, 17 bp, Homo sapiens
aagaggacaagagccct

SEQ ID NO: 222 - DNA, 17 bp, Homo sapiens
agaggacaagagccctc

SEQ ID NO: 223 - DNA, 17 bp, Homo sapiens
gaggacaagagccctcc

SEQ ID NO: 224 - DNA, 17 bp, Homo sapiens
aggacaagagccctcca

SEQ ID NO: 225 - DNA, 17 bp, Homo sapiens
ggacaagagccctccac

SEQ ID NO: 226 - DNA, 17 bp, Homo sapiens
gacaagagccctccacc

SEQ ID NO: 227 - DNA, 17 bp, Homo sapiens
acaagagccctccacca

SEQ ID NO: 228 - DNA, 17 bp, Homo sapiens
caagagccctccaccat

SEQ ID NO: 229 - DNA, 17 bp, Homo sapiens
aagagccctccaccatc

SEQ ID NO: 230 - DNA, 17 bp, Homo sapiens
agagccctccaccatcc

SEQ ID NO: 231 - DNA, 17 bp, Homo sapiens
gagccctccaccatcct

SEQ ID NO: 232 - DNA, 17 bp, Homo sapiens
agccctccaccatcctc

SEQ ID NO: 233 - DNA, 17 bp, Homo sapiens
gccctccaccatcctcg

SEQ ID NO: 234 - DNA, 17 bp, Homo sapiens
ccctccaccatcctcgc

SEQ ID NO: 235 - DNA, 17 bp, Homo sapiens
cctccaccatcctcgcc

SEQ ID NO: 236 - DNA, 17 bp, Homo sapiens
ctccaccatcctcgccc

SEQ ID NO: 237 - DNA, 17 bp, Homo sapiens
tccaccatcctcgcccc

SEQ ID NO: 238 - DNA, 17 bp, Homo sapiens
ccaccatcctcgccccc

SEQ ID NO: 239 - DNA, 17 bp, Homo sapiens
caccatcctcgccccct

SEQ ID NO: 240 - DNA, 17 bp, Homo sapiens
accatcctcgccccctc

SEQ ID NO: 241 - DNA, 17 bp, Homo sapiens
ccatcctcgccccctcc

SEQ ID NO: 242 - DNA, 17 bp, Homo sapiens
catcctcgccccctcct

SEQ ID NO: 243 - DNA, 17 bp, Homo sapiens
atcctcgccccctcctc

SEQ ID NO: 244 - DNA, 17 bp, Homo sapiens
tcctcgccccctcctct

SEQ ID NO: 245 - DNA, 17 bp, Homo sapiens
cctcgccccctcctctt

SEQ ID NO: 246 - DNA, 17 bp, Homo sapiens
ctcgccccctcctcttt

SEQ ID NO: 247 - DNA, 17 bp, Homo sapiens
tcgccccctcctctttt

SEQ ID NO: 248 - DNA, 17 bp, Homo sapiens
cgccccctcctcttttc

SEQ ID NO: 249 - DNA, 17 bp, Homo sapiens
gccccctcctcttttct

SEQ ID NO: 250 - DNA, 17 bp, Homo sapiens
ccccctcctcttttctc

SEQ ID NO: 251 - DNA, 17 bp, Homo sapiens
cccctcctcttttctct

SEQ ID NO: 252 - DNA, 17 bp, Homo sapiens
ccctcctcttttctctg

SEQ ID NO: 253 - DNA, 17 bp, Homo sapiens
cctcctcttttctctgt

SEQ ID NO: 254 - DNA, 17 bp, Homo sapiens
ctcctcttttctctgtc

SEQ ID NO: 255 - DNA, 17 bp, Homo sapiens
tcctcttttctctgtca

SEQ ID NO: 256 - DNA, 17 bp, Homo sapiens
cctcttttctctgtcat

SEQ ID NO: 257 - DNA, 17 bp, Homo sapiens
ctcttttctctgtcatc

SEQ ID NO: 258 - DNA, 17 bp, Homo sapiens
tcttttctctgtcatcc

SEQ ID NO: 259 - DNA, 17 bp, Homo sapiens
cttttctctgtcatccc

SEQ ID NO: 260 - DNA, 17 bp, Homo sapiens
ttttctctgtcatccca

SEQ ID NO: 261 - DNA, 17 bp, Homo sapiens
tttctctgtcatcccag

SEQ ID NO: 262 - DNA, 17 bp, Homo sapiens
ttctctgtcatcccagg

SEQ ID NO: 263 - DNA, 17 bp, Homo sapiens
tctctgtcatcccaggg

SEQ ID NO: 264 - DNA, 17 bp, Homo sapiens
ctctgtcatcccagggg

SEQ ID NO: 265 - DNA, 17 bp, Homo sapiens
tctgtcatcccaggggg

SEQ ID NO: 266 - DNA, 17 bp, Homo sapiens
ctgtcatcccagggggc

SEQ ID NO: 267 - DNA, 17 bp, Homo sapiens
tgtcatcccagggggct

SEQ ID NO: 268 - DNA, 17 bp, Homo sapiens
gtcatcccagggggctt

SEQ ID NO: 269 - DNA, 17 bp, Homo sapiens
tcatcccagggggcttc

SEQ ID NO: 270 - DNA, 17 bp, Homo sapiens
catcccagggggcttca

SEQ ID NO: 271 - DNA, 17 bp, Homo sapiens
atcccagggggcttcat

SEQ ID NO: 272 - DNA, 17 bp, Homo sapiens
tcccagggggcttcatt

SEQ ID NO: 273 - DNA, 17 bp, Homo sapiens
cccagggggcttcatta

SEQ ID NO: 274 - DNA, 17 bp, Homo sapiens
ccagggggcttcattaa

SEQ ID NO: 275 - DNA, 17 bp, Homo sapiens
cagggggcttcattaag

SEQ ID NO: 276 - DNA, 17 bp, Homo sapiens
agggggcttcattaagc

SEQ ID NO: 277 - DNA, 17 bp, Homo sapiens
gggggcttcattaagca

SEQ ID NO: 278 - DNA, 17 bp, Homo sapiens
ggggcttcattaagcaa

SEQ ID NO: 279 - DNA, 17 bp, Homo sapiens
gggcttcattaagcaac

SEQ ID NO: 280 - DNA, 17 bp, Homo sapiens
ggcttcattaagcaact

SEQ ID NO: 281 - DNA, 17 bp, Homo sapiens
gcttcattaagcaactg

SEQ ID NO: 282 - DNA, 17 bp, Homo sapiens
cttcattaagcaactgg

SEQ ID NO: 283 - DNA, 17 bp, Homo sapiens
ttcattaagcaactggt

SEQ ID NO: 284 - DNA, 17 bp, Homo sapiens
tcattaagcaactggtc

SEQ ID NO: 285 - DNA, 17 bp, Homo sapiens
cattaagcaactggtcc

SEQ ID NO: 286 - DNA, 17 bp, Homo sapiens
attaagcaactggtccg

SEQ ID NO: 287 - DNA, 17 bp, Homo sapiens
ttaagcaactggtccgg

SEQ ID NO: 288 - DNA, 17 bp, Homo sapiens
taagcaactggtccggg

SEQ ID NO: 289 - DNA, 17 bp, Homo sapiens
aagcaactggtccgggg

SEQ ID NO: 290 - DNA, 17 bp, Homo sapiens
agcaactggtccggggg

SEQ ID NO: 291 - DNA, 17 bp, Homo sapiens
gcaactggtccggggga

SEQ ID NO: 292 - DNA, 17 bp, Homo sapiens
caactggtccgggggac

SEQ ID NO: 293 - DNA, 17 bp, Homo sapiens
aactggtccgggggact

SEQ ID NO: 294 - DNA, 17 bp, Homo sapiens
actggtccgggggactg

SEQ ID NO: 295 - DNA, 17 bp, Homo sapiens
ctggtccgggggactga

SEQ ID NO: 296 - DNA, 17 bp, Homo sapiens
tggtccgggggactgaa

SEQ ID NO: 297 - DNA, 17 bp, Homo sapiens
ggtccgggggactgaaa

SEQ ID NO: 298 - DNA, 17 bp, Homo sapiens
gtccgggggactgaaaa

SEQ ID NO: 299 - DNA, 17 bp, Homo sapiens
tccgggggactgaaaaa

SEQ ID NO: 300 - DNA, 17 bp, Homo sapiens
ccgggggactgaaaaag

SEQ ID NO: 301 - DNA, 17 bp, Homo sapiens
cgggggactgaaaaaga

SEQ ID NO: 302 - DNA, 17 bp, Homo sapiens
gggggactgaaaaagag

SEQ ID NO: 303 - DNA, 17 bp, Homo sapiens
ggggactgaaaaagagg

SEQ ID NO: 304 - DNA, 17 bp, Homo sapiens
gggactgaaaaagaggc

SEQ ID NO: 305 - DNA, 17 bp, Homo sapiens
ggactgaaaaagaggcc

SEQ ID NO: 306 - DNA, 17 bp, Homo sapiens
gactgaaaaagaggcca

SEQ ID NO: 307 - DNA, 17 bp, Homo sapiens
actgaaaaagaggccaa

SEQ ID NO: 308 - DNA, 17 bp, Homo sapiens
ctgaaaaagaggccaag

SEQ ID NO: 309 - DNA, 17 bp, Homo sapiens
tgaaaaagaggccaagg

SEQ ID NO: 310 - DNA, 17 bp, Homo sapiens
gaaaaagaggccaagga

SEQ ID NO: 311 - DNA, 17 bp, Homo sapiens
aaaaagaggccaaggaa

SEQ ID NO: 312 - DNA, 17 bp, Homo sapiens
aaaagaggccaaggaag

SEQ ID NO: 313 - DNA, 17 bp, Homo sapiens
aaagaggccaaggaagc

SEQ ID NO: 314 - DNA, 17 bp, Homo sapiens
aagaggccaaggaagcg

SEQ ID NO: 315 - DNA, 17 bp, Homo sapiens
agaggccaaggaagcga

SEQ ID NO: 316 - DNA, 17 bp, Homo sapiens
gaggccaaggaagcgag

SEQ ID NO: 317 - DNA, 17 bp, Homo sapiens
aggccaaggaagcgaga

SEQ ID NO: 318 - DNA, 17 bp, Homo sapiens
ggccaaggaagcgagac

SEQ ID NO: 319 - DNA, 17 bp, Homo sapiens
gccaaggaagcgagaca

SEQ ID NO: 320 - DNA, 17 bp, Homo sapiens
ccaaggaagcgagacag

SEQ ID NO: 321 - DNA, 17 bp, Homo sapiens
caaggaagcgagacaga

SEQ ID NO: 322 - DNA, 17 bp, Homo sapiens
aaggaagcgagacagag

SEQ ID NO: 323 - DNA, 17 bp, Homo sapiens
aggaagcgagacagagg

SEQ ID NO: 324 - DNA, 17 bp, Homo sapiens
ggaagcgagacagagga

SEQ ID NO: 325 - DNA, 17 bp, Homo sapiens
gaagcgagacagaggaa

SEQ ID NO: 326 - DNA, 17 bp, Homo sapiens
aagcgagacagaggaag

SEQ ID NO: 327 - DNA, 17 bp, Homo sapiens
agcgagacagaggaagc

SEQ ID NO: 328 - DNA, 17 bp, Homo sapiens
gcgagacagaggaagca

SEQ ID NO: 329 - DNA, 17 bp, Homo sapiens
cgagacagaggaagcag

SEQ ID NO: 330 - DNA, 17 bp, Homo sapiens
gagacagaggaagcagt

SEQ ID NO: 331 - DNA, 17 bp, Homo sapiens
agacagaggaagcagtt

SEQ ID NO: 332 - DNA, 17 bp, Homo sapiens
gacagaggaagcagtta

SEQ ID NO: 333 - DNA, 17 bp, Homo sapiens
acagaggaagcagttag

SEQ ID NO: 334 - DNA, 17 bp, Homo sapiens
cagaggaagcagttagc

SEQ ID NO: 335 - DNA, 17 bp, Homo sapiens
agaggaagcagttagct

SEQ ID NO: 336 - DNA, 17 bp, Homo sapiens
gaggaagcagttagctg

SEQ ID NO: 337 - DNA, 17 bp, Homo sapiens
aggaagcagttagctgt

SEQ ID NO: 338 - DNA, 17 bp, Homo sapiens
ggaagcagttagctgtc

SEQ ID NO: 339 - DNA, 17 bp, Homo sapiens
gaagcagttagctgtcg

SEQ ID NO: 340 - DNA, 17 bp, Homo sapiens
aagcagttagctgtcgc

SEQ ID NO: 341 - DNA, 17 bp, Homo sapiens
agcagttagctgtcgcc

SEQ ID NO: 342 - DNA, 17 bp, Homo sapiens
gcagttagctgtcgcct

SEQ ID NO: 343 - DNA, 17 bp, Homo sapiens
cagttagctgtcgcctc

SEQ ID NO: 344 - DNA, 17 bp, Homo sapiens
agttagctgtcgcctct

SEQ ID NO: 345 - DNA, 17 bp, Homo sapiens
gttagctgtcgcctctc

SEQ ID NO: 346 - DNA, 17 bp, Homo sapiens
ttagctgtcgcctctcc

SEQ ID NO: 347 - DNA, 17 bp, Homo sapiens
tagctgtcgcctctcca

SEQ ID NO: 348 - DNA, 17 bp, Homo sapiens
agctgtcgcctctccag

SEQ ID NO: 349 - DNA, 17 bp, Homo sapiens
gctgtcgcctctccaga

SEQ ID NO: 350 - DNA, 17 bp, Homo sapiens
ctgtcgcctctccagaa

SEQ ID NO: 351 - DNA, 17 bp, Homo sapiens
tgtcgcctctccagaac

SEQ ID NO: 352 - DNA, 17 bp, Homo sapiens
gtcgcctctccagaacg

SEQ ID NO: 353 - DNA, 17 bp, Homo sapiens
tcgcctctccagaacga

SEQ ID NO: 354 - DNA, 17 bp, Homo sapiens
cgcctctccagaacgag

SEQ ID NO: 355 - DNA, 17 bp, Homo sapiens
gcctctccagaacgaga

SEQ ID NO: 356 - DNA, 17 bp, Homo sapiens
cctctccagaacgagag

SEQ ID NO: 357 - DNA, 17 bp, Homo sapiens
ctctccagaacgagaga

SEQ ID NO: 358 - DNA, 17 bp, Homo sapiens
tctccagaacgagagat

SEQ ID NO: 359 - DNA, 17 bp, Homo sapiens
ctccagaacgagagatc

SEQ ID NO: 360 - DNA, 17 bp, Homo sapiens
tccagaacgagagatcc

SEQ ID NO: 361 - DNA, 17 bp, Homo sapiens
ccagaacgagagatccc

SEQ ID NO: 362 - DNA, 17 bp, Homo sapiens
cagaacgagagatccca

SEQ ID NO: 363 - DNA, 17 bp, Homo sapiens
agaacgagagatcccag

SEQ ID NO: 364 - DNA, 17 bp, Homo sapiens
gaacgagagatcccaga

SEQ ID NO: 365 - DNA, 17 bp, Homo sapiens
aacgagagatcccagaa

SEQ ID NO: 366 - DNA, 17 bp, Homo sapiens
acgagagatcccagaaa

SEQ ID NO: 367 - DNA, 17 bp, Homo sapiens
cgagagatcccagaaat

SEQ ID NO: 368 - DNA, 17 bp, Homo sapiens
gagagatcccagaaatt

SEQ ID NO: 369 - DNA, 17 bp, Homo sapiens
agagatcccagaaattt

SEQ ID NO: 370 - DNA, 17 bp, Homo sapiens
gagatcccagaaatttc

SEQ ID NO: 371 - DNA, 17 bp, Homo sapiens
agatcccagaaatttcc

SEQ ID NO: 372 - DNA, 17 bp, Homo sapiens
gatcccagaaatttcca

SEQ ID NO: 373 - DNA, 17 bp, Homo sapiens
atcccagaaatttccat

SEQ ID NO: 374 - DNA, 17 bp, Homo sapiens
tcccagaaatttccatc

SEQ ID NO: 375 - DNA, 17 bp, Homo sapiens
cccagaaatttccatca

SEQ ID NO: 376 - DNA, 17 bp, Homo sapiens
ccagaaatttccatcag

SEQ ID NO: 377 - DNA, 17 bp, Homo sapiens
cagaaatttccatcagc

SEQ ID NO: 378 - DNA, 17 bp, Homo sapiens
agaaatttccatcagcc

SEQ ID NO: 379 - DNA, 17 bp, Homo sapiens
gaaatttccatcagcca

SEQ ID NO: 380 - DNA, 17 bp, Homo sapiens
aaatttccatcagccaa

SEQ ID NO: 381 - DNA, 17 bp, Homo sapiens
aatttccatcagccaac

SEQ ID NO: 382 - DNA, 17 bp, Homo sapiens
atttccatcagccaacc

SEQ ID NO: 383 - DNA, 17 bp, Homo sapiens
tttccatcagccaaccc

SEQ ID NO: 384 - DNA, 17 bp, Homo sapiens
ttccatcagccaaccca

SEQ ID NO: 385 - DNA, 17 bp, Homo sapiens
tccatcagccaacccaa

SEQ ID NO: 386 - DNA, 17 bp, Homo sapiens
ccatcagccaacccaac

SEQ ID NO: 387 - DNA, 17 bp, Homo sapiens
catcagccaacccaaca

SEQ ID NO: 388 - DNA, 17 bp, Homo sapiens
atcagccaacccaacag

SEQ ID NO: 389 - DNA, 17 bp, Homo sapiens
tcagccaacccaacagc

SEQ ID NO: 390 - DNA, 17 bp, Homo sapiens
cagccaacccaacagca

SEQ ID NO: 391 - DNA, 17 bp, Homo sapiens
agccaacccaacagcaa

SEQ ID NO: 392 - DNA, 17 bp, Homo sapiens
gccaacccaacagcaag

SEQ ID NO: 393 - DNA, 17 bp, Homo sapiens
ccaacccaacagcaagt

SEQ ID NO: 394 - DNA, 17 bp, Homo sapiens
caacccaacagcaagtc

SEQ ID NO: 395 - DNA, 17 bp, Homo sapiens
aacccaacagcaagtcc

SEQ ID NO: 396 - DNA, 17 bp, Homo sapiens
acccaacagcaagtcca

SEQ ID NO: 397 - DNA, 17 bp, Homo sapiens
cccaacagcaagtccag

SEQ ID NO: 398 - DNA, 17 bp, Homo sapiens
ccaacagcaagtccagc

SEQ ID NO: 399 - DNA, 17 bp, Homo sapiens
caacagcaagtccagca

SEQ ID NO: 400 - DNA, 17 bp, Homo sapiens
aacagcaagtccagcag

SEQ ID NO: 401 - DNA, 17 bp, Homo sapiens
acagcaagtccagcagt

SEQ ID NO: 402 - DNA, 17 bp, Homo sapiens
cagcaagtccagcagtg

SEQ ID NO: 403 - DNA, 17 bp, Homo sapiens
agcaagtccagcagtgg

SEQ ID NO: 404 - DNA, 17 bp, Homo sapiens
gcaagtccagcagtggc

SEQ ID NO: 405 - DNA, 17 bp, Homo sapiens
caagtccagcagtggca

SEQ ID NO: 406 - DNA, 17 bp, Homo sapiens
aagtccagcagtggcac

SEQ ID NO: 407 - DNA, 17 bp, Homo sapiens
agtccagcagtggcacc

SEQ ID NO: 408 - DNA, 17 bp, Homo sapiens
gtccagcagtggcacca

SEQ ID NO: 409 - DNA, 17 bp, Homo sapiens
tccagcagtggcaccag

SEQ ID NO: 410 - DNA, 17 bp, Homo sapiens
ccagcagtggcaccaga

SEQ ID NO: 411 - DNA, 17 bp, Homo sapiens
cagcagtggcaccagat

SEQ ID NO: 412 - DNA, 17 bp, Homo sapiens
agcagtggcaccagatc

SEQ ID NO: 413 - DNA, 17 bp, Homo sapiens
gcagtggcaccagatct

SEQ ID NO: 414 - DNA, 17 bp, Homo sapiens
cagtggcaccagatctg

SEQ ID NO: 415 - DNA, 17 bp, Homo sapiens
agtggcaccagatctgg

SEQ ID NO: 416 - DNA, 17 bp, Homo sapiens
gtggcaccagatctgga

SEQ ID NO: 417 - DNA, 17 bp, Homo sapiens
tggcaccagatctggaa

SEQ ID NO: 418 - DNA, 17 bp, Homo sapiens
ggcaccagatctggaag

SEQ ID NO: 419 - DNA, 17 bp, Homo sapiens
gcaccagatctggaagc

SEQ ID NO: 420 - DNA, 17 bp, Homo sapiens
caccagatctggaagcc

SEQ ID NO: 421 - DNA, 17 bp, Homo sapiens
accagatctggaagcca

SEQ ID NO: 422 - DNA, 17 bp, Homo sapiens
ccagatctggaagccag

SEQ ID NO: 423 - DNA, 17 bp, Homo sapiens
cagatctggaagccagc

SEQ ID NO: 424 - DNA, 17 bp, Homo sapiens
agatctggaagccagca

SEQ ID NO: 425 - DNA, 17 bp, Homo sapiens
gatctggaagccagcag

SEQ ID NO: 426 - DNA, 17 bp, Homo sapiens
atctggaagccagcaga

SEQ ID NO: 427 - DNA, 17 bp, Homo sapiens
tctggaagccagcagat

SEQ ID NO: 428 - DNA, 17 bp, Homo sapiens
ctggaagccagcagatc

SEQ ID NO: 429 - DNA, 17 bp, Homo sapiens
tggaagccagcagatct

SEQ ID NO: 430 - DNA, 17 bp, Homo sapiens
ggaagccagcagatctc

SEQ ID NO: 431 - DNA, 17 bp, Homo sapiens
gaagccagcagatctct

SEQ ID NO: 432 - DNA, 17 bp, Homo sapiens
aagccagcagatctctc

SEQ ID NO: 433 - DNA, 17 bp, Homo sapiens
agccagcagatctctca

SEQ ID NO: 434 - DNA, 17 bp, Homo sapiens
gccagcagatctctcag

SEQ ID NO: 435 - DNA, 17 bp, Homo sapiens
ccagcagatctctcagg

SEQ ID NO: 436 - DNA, 17 bp, Homo sapiens
cagcagatctctcagga

SEQ ID NO: 437 - DNA, 17 bp, Homo sapiens
agcagatctctcaggac

SEQ ID NO: 438 - DNA, 17 bp, Homo sapiens
gcagatctctcaggacg

SEQ ID NO: 439 - DNA, 17 bp, Homo sapiens
cagatctctcaggacga

SEQ ID NO: 440 - DNA, 17 bp, Homo sapiens
agatctctcaggacgac

SEQ ID NO: 441 - DNA, 17 bp, Homo sapiens
gatctctcaggacgacc

SEQ ID NO: 442 - DNA, 17 bp, Homo sapiens
atctctcaggacgacca

SEQ ID NO: 443 - DNA, 17 bp, Homo sapiens
tctctcaggacgaccag

SEQ ID NO: 444 - DNA, 17 bp, Homo sapiens
ctctcaggacgaccagt

SEQ ID NO: 445 - DNA, 17 bp, Homo sapiens
tctcaggacgaccagtc

SEQ ID NO: 446 - DNA, 17 bp, Homo sapiens
ctcaggacgaccagtca

SEQ ID NO: 447 - DNA, 17 bp, Homo sapiens
tcaggacgaccagtcaa

SEQ ID NO: 448 - DNA, 17 bp, Homo sapiens
caggacgaccagtcaag

SEQ ID NO: 449 - DNA, 17 bp, Homo sapiens
aggacgaccagtcaagc

SEQ ID NO: 450 - DNA, 17 bp, Homo sapiens
ggacgaccagtcaagct

SEQ ID NO: 451 - DNA, 17 bp, Homo sapiens
gacgaccagtcaagctc

SEQ ID NO: 452 - DNA, 17 bp, Homo sapiens
acgaccagtcaagctct

SEQ ID NO: 453 - DNA, 17 bp, Homo sapiens
cgaccagtcaagctctc

SEQ ID NO: 454 - DNA, 17 bp, Homo sapiens
gaccagtcaagctctcc

SEQ ID NO: 455 - DNA, 17 bp, Homo sapiens
accagtcaagctctcct

SEQ ID NO: 456 - DNA, 17 bp, Homo sapiens
ccagtcaagctctcctg

SEQ ID NO: 457 - DNA, 17 bp, Homo sapiens
cagtcaagctctcctgg

SEQ ID NO: 458 - DNA, 17 bp, Homo sapiens
agtcaagctctcctggg

SEQ ID NO: 459 - DNA, 17 bp, Homo sapiens
gtcaagctctcctggga

SEQ ID NO: 460 - DNA, 17 bp, Homo sapiens
tcaagctctcctgggag

SEQ ID NO: 461 - DNA, 17 bp, Homo sapiens
caagctctcctgggagc

SEQ ID NO: 462 - DNA, 17 bp, Homo sapiens
aagctctcctgggagct

SEQ ID NO: 463 - DNA, 17 bp, Homo sapiens
agctctcctgggagctc

SEQ ID NO: 464 - DNA, 17 bp, Homo sapiens
gctctcctgggagctca

SEQ ID NO: 465 - DNA, 17 bp, Homo sapiens
ctctcctgggagctcag

SEQ ID NO: 466 - DNA, 17 bp, Homo sapiens
tctcctgggagctcaga

SEQ ID NO: 467 - DNA, 17 bp, Homo sapiens
ctcctgggagctcagac

SEQ ID NO: 468 - DNA, 17 bp, Homo sapiens
tcctgggagctcagaca

SEQ ID NO: 469 - DNA, 17 bp, Homo sapiens
cctgggagctcagacat

SEQ ID NO: 470 - DNA, 17 bp, Homo sapiens
ctgggagctcagacatt

SEQ ID NO: 471 - DNA, 17 bp, Homo sapiens
tgggagctcagacattc

SEQ ID NO: 472 - DNA, 17 bp, Homo sapiens
gggagctcagacattct

SEQ ID NO: 473 - DNA, 17 bp, Homo sapiens
ggagctcagacattctg

SEQ ID NO: 474 - DNA, 17 bp, Homo sapiens
gagctcagacattctgg

SEQ ID NO: 475 - DNA, 17 bp, Homo sapiens
agctcagacattctggg

SEQ ID NO: 476 - DNA, 17 bp, Homo sapiens
gctcagacattctgggc

SEQ ID NO: 477 - DNA, 17 bp, Homo sapiens
ctcagacattctgggca

SEQ ID NO: 478 - DNA, 17 bp, Homo sapiens
tcagacattctgggcaa

SEQ ID NO: 479 - DNA, 17 bp, Homo sapiens
cagacattctgggcaag

SEQ ID NO: 480 - DNA, 17 bp, Homo sapiens
agacattctgggcaagg

SEQ ID NO: 481 - DNA, 17 bp, Homo sapiens
gacattctgggcaagga

SEQ ID NO: 482 - DNA, 17 bp, Homo sapiens
acattctgggcaaggag

SEQ ID NO: 483 - DNA, 17 bp, Homo sapiens
cattctgggcaaggaga

SEQ ID NO: 484 - DNA, 17 bp, Homo sapiens
attctgggcaaggagag

SEQ ID NO: 485 - DNA, 17 bp, Homo sapiens
ttctgggcaaggagagc

SEQ ID NO: 486 - DNA, 17 bp, Homo sapiens
tctgggcaaggagagcg

SEQ ID NO: 487 - DNA, 17 bp, Homo sapiens
ctgggcaaggagagcga

SEQ ID NO: 488 - DNA, 17 bp, Homo sapiens
tgggcaaggagagcgag

SEQ ID NO: 489 - DNA, 17 bp, Homo sapiens
gggcaaggagagcgagg

SEQ ID NO: 490 - DNA, 17 bp, Homo sapiens
ggcaaggagagcgaggg

SEQ ID NO: 491 - DNA, 17 bp, Homo sapiens
gcaaggagagcgagggg

SEQ ID NO: 492 - DNA, 17 bp, Homo sapiens
caaggagagcgaggggt

SEQ ID NO: 493 - DNA, 17 bp, Homo sapiens
aaggagagcgaggggtc

SEQ ID NO: 494 - DNA, 17 bp, Homo sapiens
aggagagcgaggggtcc

SEQ ID NO: 495 - DNA, 17 bp, Homo sapiens
ggagagcgaggggtccc

SEQ ID NO: 496 - DNA, 17 bp, Homo sapiens
gagagcgaggggtcccg

SEQ ID NO: 497 - DNA, 17 bp, Homo sapiens
agagcgaggggtcccgc

SEQ ID NO: 498 - DNA, 17 bp, Homo sapiens
gagcgaggggtcccgca

SEQ ID NO: 499 - DNA, 17 bp, Homo sapiens
agcgaggggtcccgcag

SEQ ID NO: 500 - DNA, 17 bp, Homo sapiens
gcgaggggtcccgcagc

SEQ ID NO: 501 - DNA, 17 bp, Homo sapiens
cgaggggtcccgcagcc

SEQ ID NO: 502 - DNA, 17 bp, Homo sapiens
gaggggtcccgcagccc

SEQ ID NO: 503 - DNA, 17 bp, Homo sapiens
aggggtcccgcagcccc

SEQ ID NO: 504 - DNA, 17 bp, Homo sapiens
ggggtcccgcagccccg

SEQ ID NO: 505 - DNA, 17 bp, Homo sapiens
gggtcccgcagccccga

SEQ ID NO: 506 - DNA, 17 bp, Homo sapiens
ggtcccgcagccccgac

SEQ ID NO: 507 - DNA, 17 bp, Homo sapiens
gtcccgcagccccgacc

SEQ ID NO: 508 - DNA, 17 bp, Homo sapiens
tcccgcagccccgaccc

SEQ ID NO: 509 - DNA, 17 bp, Homo sapiens
cccgcagccccgaccct

SEQ ID NO: 510 - DNA, 17 bp, Homo sapiens
ccgcagccccgaccctg

SEQ ID NO: 511 - DNA, 17 bp, Homo sapiens
cgcagccccgaccctga

SEQ ID NO: 512 - DNA, 17 bp, Homo sapiens
gcagccccgaccctgag

SEQ ID NO: 513 - DNA, 17 bp, Homo sapiens
cagccccgaccctgagc

SEQ ID NO: 514 - DNA, 17 bp, Homo sapiens
agccccgaccctgagca

SEQ ID NO: 515 - DNA, 17 bp, Homo sapiens
gccccgaccctgagcag

SEQ ID NO: 516 - DNA, 17 bp, Homo sapiens
ccccgaccctgagcaga

SEQ ID NO: 517 - DNA, 17 bp, Homo sapiens
cccgaccctgagcagat

SEQ ID NO: 518 - DNA, 17 bp, Homo sapiens
ccgaccctgagcagatg

SEQ ID NO: 519 - DNA, 17 bp, Homo sapiens
cgaccctgagcagatga

SEQ ID NO: 520 - DNA, 17 bp, Homo sapiens
gaccctgagcagatgac

SEQ ID NO: 521 - DNA, 17 bp, Homo sapiens
accctgagcagatgaca

SEQ ID NO: 522 - DNA, 17 bp, Homo sapiens
ccctgagcagatgacaa

SEQ ID NO: 523 - DNA, 17 bp, Homo sapiens
cctgagcagatgacaag

SEQ ID NO: 524 - DNA, 17 bp, Homo sapiens
ctgagcagatgacaagc

SEQ ID NO: 525 - DNA, 17 bp, Homo sapiens
tgagcagatgacaagca

SEQ ID NO: 526 - DNA, 17 bp, Homo sapiens
gagcagatgacaagcat

SEQ ID NO: 527 - DNA, 17 bp, Homo sapiens
agcagatgacaagcatc

SEQ ID NO: 528 - DNA, 17 bp, Homo sapiens
gcagatgacaagcatca

SEQ ID NO: 529 - DNA, 17 bp, Homo sapiens
cagatgacaagcatcaa

SEQ ID NO: 530 - DNA, 17 bp, Homo sapiens
agatgacaagcatcaat

SEQ ID NO: 531 - DNA, 17 bp, Homo sapiens
gatgacaagcatcaatg

SEQ ID NO: 532 - DNA, 17 bp, Homo sapiens
atgacaagcatcaatgg

SEQ ID NO: 533 - DNA, 17 bp, Homo sapiens
tgacaagcatcaatggt

SEQ ID NO: 534 - DNA, 17 bp, Homo sapiens
gacaagcatcaatggtg

SEQ ID NO: 535 - DNA, 17 bp, Homo sapiens
acaagcatcaatggtga

SEQ ID NO: 536 - DNA, 17 bp, Homo sapiens
caagcatcaatggtgag

SEQ ID NO: 537 - DNA, 17 bp, Homo sapiens
aagcatcaatggtgaga

SEQ ID NO: 538 - DNA, 17 bp, Homo sapiens
agcatcaatggtgagaa

SEQ ID NO: 539 - DNA, 17 bp, Homo sapiens
gcatcaatggtgagaag

SEQ ID NO: 540 - DNA, 17 bp, Homo sapiens
catcaatggtgagaagg

SEQ ID NO: 541 - DNA, 17 bp, Homo sapiens
atcaatggtgagaaggc

SEQ ID NO: 542 - DNA, 17 bp, Homo sapiens
tcaatggtgagaaggcc

SEQ ID NO: 543 - DNA, 17 bp, Homo sapiens
caatggtgagaaggccc

SEQ ID NO: 544 - DNA, 17 bp, Homo sapiens
aatggtgagaaggccca

SEQ ID NO: 545 - DNA, 17 bp, Homo sapiens
atggtgagaaggcccag

SEQ ID NO: 546 - DNA, 17 bp, Homo sapiens
tggtgagaaggcccagg

SEQ ID NO: 547 - DNA, 17 bp, Homo sapiens
ggtgagaaggcccagga

SEQ ID NO: 548 - DNA, 17 bp, Homo sapiens
gtgagaaggcccaggag

SEQ ID NO: 549 - DNA, 17 bp, Homo sapiens
tgagaaggcccaggagc

SEQ ID NO: 550 - DNA, 17 bp, Homo sapiens
gagaaggcccaggagct

SEQ ID NO: 551 - DNA, 17 bp, Homo sapiens
agaaggcccaggagctg

SEQ ID NO: 552 - DNA, 17 bp, Homo sapiens
gaaggcccaggagctgg

SEQ ID NO: 553 - DNA, 17 bp, Homo sapiens
aaggcccaggagctggg

SEQ ID NO: 554 - DNA, 17 bp, Homo sapiens
aggcccaggagctgggc

SEQ ID NO: 555 - DNA, 17 bp, Homo sapiens
ggcccaggagctgggct

SEQ ID NO: 556 - DNA, 17 bp, Homo sapiens
gcccaggagctgggctc

SEQ ID NO: 557 - DNA, 17 bp, Homo sapiens
cccaggagctgggctcc

SEQ ID NO: 558 - DNA, 17 bp, Homo sapiens
ccaggagctgggctcca

SEQ ID NO: 559 - DNA, 17 bp, Homo sapiens
caggagctgggctccag

SEQ ID NO: 560 - DNA, 17 bp, Homo sapiens
aggagctgggctccagt

SEQ ID NO: 561 - DNA, 17 bp, Homo sapiens
ggagctgggctccagtg

SEQ ID NO: 562 - DNA, 17 bp, Homo sapiens
gagctgggctccagtgc

SEQ ID NO: 563 - DNA, 17 bp, Homo sapiens
agctgggctccagtgcg

SEQ ID NO: 564 - DNA, 17 bp, Homo sapiens
gctgggctccagtgcga

SEQ ID NO: 565 - DNA, 17 bp, Homo sapiens
ctgggctccagtgcgac

SEQ ID NO: 566 - DNA, 17 bp, Homo sapiens
tgggctccagtgcgaca

SEQ ID NO: 567 - DNA, 17 bp, Homo sapiens
gggctccagtgcgacac

SEQ ID NO: 568 - DNA, 17 bp, Homo sapiens
ggctccagtgcgacacc

SEQ ID NO: 569 - DNA, 17 bp, Homo sapiens
gctccagtgcgacacca

SEQ ID NO: 570 - DNA, 17 bp, Homo sapiens
ctccagtgcgacaccaa

SEQ ID NO: 571 - DNA, 17 bp, Homo sapiens
tccagtgcgacaccaac

SEQ ID NO: 572 - DNA, 17 bp, Homo sapiens
ccagtgcgacaccaacc

SEQ ID NO: 573 - DNA, 17 bp, Homo sapiens
cagtgcgacaccaacca

SEQ ID NO: 574 - DNA, 17 bp, Homo sapiens
agtgcgacaccaaccaa

SEQ ID NO: 575 - DNA, 17 bp, Homo sapiens
gtgcgacaccaaccaaa

SEQ ID NO: 576 - DNA, 17 bp, Homo sapiens
tgcgacaccaaccaaaa

SEQ ID NO: 577 - DNA, 17 bp, Homo sapiens
gcgacaccaaccaaaaa

SEQ ID NO: 578 - DNA, 17 bp, Homo sapiens
cgacaccaaccaaaaag

SEQ ID NO: 579 - DNA, 17 bp, Homo sapiens
gacaccaaccaaaaaga

SEQ ID NO: 580 - DNA, 17 bp, Homo sapiens
acaccaaccaaaaagac

SEQ ID NO: 581 - DNA, 17 bp, Homo sapiens
caccaaccaaaaagact

SEQ ID NO: 582 - DNA, 17 bp, Homo sapiens
accaaccaaaaagactg

SEQ ID NO: 583 - DNA, 17 bp, Homo sapiens
ccaaccaaaaagactgt

SEQ ID NO: 584 - DNA, 17 bp, Homo sapiens
caaccaaaaagactgtc

SEQ ID NO: 585 - DNA, 17 bp, Homo sapiens
aaccaaaaagactgtcc

SEQ ID NO: 586 - DNA, 17 bp, Homo sapiens
accaaaaagactgtccc

SEQ ID NO: 587 - DNA, 17 bp, Homo sapiens
ccaaaaagactgtcccc

SEQ ID NO: 588 - DNA, 17 bp, Homo sapiens
caaaaagactgtcccct

SEQ ID NO: 589 - DNA, 17 bp, Homo sapiens
aaaaagactgtcccctt

SEQ ID NO: 590 - DNA, 17 bp, Homo sapiens
aaaagactgtccccttc

SEQ ID NO: 591 - DNA, 17 bp, Homo sapiens
aaagactgtccccttca

SEQ ID NO: 592 - DNA, 17 bp, Homo sapiens
aagactgtccccttcaa

SEQ ID NO: 593 - DNA, 17 bp, Homo sapiens
agactgtccccttcaag

SEQ ID NO: 594 - DNA, 17 bp, Homo sapiens
gactgtccccttcaaga

SEQ ID NO: 595 - DNA, 17 bp, Homo sapiens
actgtccccttcaagag

SEQ ID NO: 596 - DNA, 17 bp, Homo sapiens
ctgtccccttcaagagg

SEQ ID NO: 597 - DNA, 17 bp, Homo sapiens
tgtccccttcaagaggg

SEQ ID NO: 598 - DNA, 17 bp, Homo sapiens
gtccccttcaagagggg

SEQ ID NO: 599 - DNA, 17 bp, Homo sapiens
tccccttcaagaggggc

SEQ ID NO: 600 - DNA, 17 bp, Homo sapiens
ccccttcaagaggggcg

SEQ ID NO: 601 - DNA, 17 bp, Homo sapiens
cccttcaagaggggcgt

SEQ ID NO: 602 - DNA, 17 bp, Homo sapiens
ccttcaagaggggcgtg

SEQ ID NO: 603 - DNA, 17 bp, Homo sapiens
cttcaagaggggcgtga

SEQ ID NO: 604 - DNA, 17 bp, Homo sapiens
ttcaagaggggcgtgag

SEQ ID NO: 605 - DNA, 17 bp, Homo sapiens
tcaagaggggcgtgagg

SEQ ID NO: 606 - DNA, 17 bp, Homo sapiens
caagaggggcgtgagga

SEQ ID NO: 607 - DNA, 17 bp, Homo sapiens
aagaggggcgtgaggag

SEQ ID NO: 608 - DNA, 17 bp, Homo sapiens
agaggggcgtgaggagg

SEQ ID NO: 609 - DNA, 17 bp, Homo sapiens
gaggggcgtgaggaggg

SEQ ID NO: 610 - DNA, 17 bp, Homo sapiens
aggggcgtgaggagggg

SEQ ID NO: 611 - DNA, 17 bp, Homo sapiens
ggggcgtgaggaggggt

SEQ ID NO: 612 - DNA, 17 bp, Homo sapiens
gggcgtgaggaggggtg

SEQ ID NO: 613 - DNA, 17 bp, Homo sapiens
ggcgtgaggaggggtga

SEQ ID NO: 614 - DNA, 17 bp, Homo sapiens
gcgtgaggaggggtgat

SEQ ID NO: 615 - DNA, 17 bp, Homo sapiens
cgtgaggaggggtgatg

SEQ ID NO: 616 - DNA, 17 bp, Homo sapiens
gtgaggaggggtgatgt

SEQ ID NO: 617 - DNA, 17 bp, Homo sapiens
tgaggaggggtgatgtg

SEQ ID NO: 618 - DNA, 17 bp, Homo sapiens
gaggaggggtgatgtgt

SEQ ID NO: 619 - DNA, 17 bp, Homo sapiens
aggaggggtgatgtgtt

SEQ ID NO: 620 - DNA, 17 bp, Homo sapiens
ggaggggtgatgtgttg

SEQ ID NO: 621 - DNA, 17 bp, Homo sapiens
gaggggtgatgtgttgt

SEQ ID NO: 622 - DNA, 17 bp, Homo sapiens
aggggtgatgtgttgtt

SEQ ID NO: 623 - DNA, 17 bp, Homo sapiens
ggggtgatgtgttgttg

SEQ ID NO: 624 - DNA, 17 bp, Homo sapiens
gggtgatgtgttgttga

SEQ ID NO: 625 - DNA, 17 bp, Homo sapiens
ggtgatgtgttgttgat

SEQ ID NO: 626 - DNA, 17 bp, Homo sapiens
gtgatgtgttgttgatg

SEQ ID NO: 627 - DNA, 17 bp, Homo sapiens
tgatgtgttgttgatgg

SEQ ID NO: 628 - DNA, 17 bp, Homo sapiens
gatgtgttgttgatggt

SEQ ID NO: 629 - DNA, 17 bp, Homo sapiens
atgtgttgttgatggtg

SEQ ID NO: 630 - DNA, 17 bp, Homo sapiens
tgtgttgttgatggtgg

SEQ ID NO: 631 - DNA, 17 bp, Homo sapiens
gtgttgttgatggtggc

SEQ ID NO: 632 - DNA, 17 bp, Homo sapiens
tgttgttgatggtggcc

SEQ ID NO: 633 - DNA, 17 bp, Homo sapiens
gttgttgatggtggcca

SEQ ID NO: 634 - DNA, 17 bp, Homo sapiens
ttgttgatggtggccaa

SEQ ID NO: 635 - DNA, 17 bp, Homo sapiens
tgttgatggtggccaag

SEQ ID NO: 636 - DNA, 17 bp, Homo sapiens
gttgatggtggccaagc

SEQ ID NO: 637 - DNA, 17 bp, Homo sapiens
ttgatggtggccaagct

SEQ ID NO: 638 - DNA, 17 bp, Homo sapiens
tgatggtggccaagctg

SEQ ID NO: 639 - DNA, 17 bp, Homo sapiens
gatggtggccaagctgg

SEQ ID NO: 640 - DNA, 17 bp, Homo sapiens
atggtggccaagctgga

SEQ ID NO: 641 - DNA, 17 bp, Homo sapiens
tggtggccaagctggac

SEQ ID NO: 642 - DNA, 17 bp, Homo sapiens
ggtggccaagctggacc

SEQ ID NO: 643 - DNA, 17 bp, Homo sapiens
gtggccaagctggaccc

SEQ ID NO: 644 - DNA, 17 bp, Homo sapiens
tggccaagctggacccg

SEQ ID NO: 645 - DNA, 17 bp, Homo sapiens
ggccaagctggacccgg

SEQ ID NO: 646 - DNA, 17 bp, Homo sapiens
gccaagctggacccgga

SEQ ID NO: 647 - DNA, 17 bp, Homo sapiens
ccaagctggacccggac

SEQ ID NO: 648 - DNA, 17 bp, Homo sapiens
caagctggacccggact

SEQ ID NO: 649 - DNA, 17 bp, Homo sapiens
aagctggacccggactc

SEQ ID NO: 650 - DNA, 17 bp, Homo sapiens
agctggacccggactca

SEQ ID NO: 651 - DNA, 17 bp, Homo sapiens
gctggacccggactcag

SEQ ID NO: 652 - DNA, 17 bp, Homo sapiens
ctggacccggactcagc

SEQ ID NO: 653 - DNA, 17 bp, Homo sapiens
tggacccggactcagcc

SEQ ID NO: 654 - DNA, 17 bp, Homo sapiens
ggacccggactcagcca

SEQ ID NO: 655 - DNA, 17 bp, Homo sapiens
gacccggactcagccaa

SEQ ID NO: 656 - DNA, 17 bp, Homo sapiens
acccggactcagccaag

SEQ ID NO: 657 - DNA, 17 bp, Homo sapiens
cccggactcagccaagc

SEQ ID NO: 658 - DNA, 17 bp, Homo sapiens
ccggactcagccaagcc

SEQ ID NO: 659 - DNA, 17 bp, Homo sapiens
cggactcagccaagcca

SEQ ID NO: 660 - DNA, 17 bp, Homo sapiens
ggactcagccaagccag

SEQ ID NO: 661 - DNA, 17 bp, Homo sapiens
gactcagccaagccaga

SEQ ID NO: 662 - DNA, 17 bp, Homo sapiens
actcagccaagccagag

SEQ ID NO: 663 - DNA, 17 bp, Homo sapiens
ctcagccaagccagaga

SEQ ID NO: 664 - DNA, 17 bp, Homo sapiens
tcagccaagccagagaa

SEQ ID NO: 665 - DNA, 17 bp, Homo sapiens
cagccaagccagagaag

SEQ ID NO: 666 - DNA, 17 bp, Homo sapiens
agccaagccagagaaga

SEQ ID NO: 667 - DNA, 17 bp, Homo sapiens
gccaagccagagaagac

SEQ ID NO: 668 - DNA, 17 bp, Homo sapiens
ccaagccagagaagact

SEQ ID NO: 669 - DNA, 17 bp, Homo sapiens
caagccagagaagactc

SEQ ID NO: 670 - DNA, 17 bp, Homo sapiens
aagccagagaagactca

SEQ ID NO: 671 - DNA, 17 bp, Homo sapiens
agccagagaagactcat

SEQ ID NO: 672 - DNA, 17 bp, Homo sapiens
gccagagaagactcatc

SEQ ID NO: 673 - DNA, 17 bp, Homo sapiens
ccagagaagactcatcc

SEQ ID NO: 674 - DNA, 17 bp, Homo sapiens
cagagaagactcatccc

SEQ ID NO: 675 - DNA, 17 bp, Homo sapiens
agagaagactcatcccc

SEQ ID NO: 676 - DNA, 17 bp, Homo sapiens
gagaagactcatcccca

SEQ ID NO: 677 - DNA, 17 bp, Homo sapiens
agaagactcatccccat

SEQ ID NO: 678 - DNA, 17 bp, Homo sapiens
gaagactcatccccatg

SEQ ID NO: 679 - DNA, 17 bp, Homo sapiens
aagactcatccccatga

SEQ ID NO: 680 - DNA, 17 bp, Homo sapiens
agactcatccccatgac

SEQ ID NO: 681 - DNA, 17 bp, Homo sapiens
gactcatccccatgacg

SEQ ID NO: 682 - DNA, 17 bp, Homo sapiens
actcatccccatgacgc

SEQ ID NO: 683 - DNA, 17 bp, Homo sapiens
ctcatccccatgacgcc

SEQ ID NO: 684 - DNA, 17 bp, Homo sapiens
tcatccccatgacgccc

SEQ ID NO: 685 - DNA, 17 bp, Homo sapiens
catccccatgacgcccc

SEQ ID NO: 686 - DNA, 17 bp, Homo sapiens
atccccatgacgccccc

SEQ ID NO: 687 - DNA, 17 bp, Homo sapiens
tccccatgacgcccccc

SEQ ID NO: 688 - DNA, 17 bp, Homo sapiens
ccccatgacgccccccc

SEQ ID NO: 689 - DNA, 17 bp, Homo sapiens
cccatgacgccccccct

SEQ ID NO: 690 - DNA, 17 bp, Homo sapiens
ccatgacgccccccctt

SEQ ID NO: 691 - DNA, 17 bp, Homo sapiens
catgacgcccccccttg

SEQ ID NO: 692 - DNA, 17 bp, Homo sapiens
atgacgcccccccttgc

SEQ ID NO: 693 - DNA, 17 bp, Homo sapiens
tgacgcccccccttgca

SEQ ID NO: 694 - DNA, 17 bp, Homo sapiens
gacgcccccccttgcaa

SEQ ID NO: 695 - DNA, 17 bp, Homo sapiens
acgcccccccttgcaag

SEQ ID NO: 696 - DNA, 17 bp, Homo sapiens
cgcccccccttgcaaga

SEQ ID NO: 697 - DNA, 17 bp, Homo sapiens
gcccccccttgcaagac

SEQ ID NO: 698 - DNA, 17 bp, Homo sapiens
cccccccttgcaagacc

SEQ ID NO: 699 - DNA, 17 bp, Homo sapiens
ccccccttgcaagacct

SEQ ID NO: 700 - DNA, 17 bp, Homo sapiens
cccccttgcaagacctc

SEQ ID NO: 701 - DNA, 17 bp, Homo sapiens
ccccttgcaagacctct

SEQ ID NO: 702 - DNA, 17 bp, Homo sapiens
cccttgcaagacctctc

SEQ ID NO: 703 - DNA, 17 bp, Homo sapiens
ccttgcaagacctctcc

SEQ ID NO: 704 - DNA, 17 bp, Homo sapiens
cttgcaagacctctccc

SEQ ID NO: 705 - DNA, 17 bp, Homo sapiens
ttgcaagacctctcccc

SEQ ID NO: 706 - DNA, 17 bp, Homo sapiens
tgcaagacctctccccc

SEQ ID NO: 707 - DNA, 17 bp, Homo sapiens
gcaagacctctcccccc

SEQ ID NO: 708 - DNA, 17 bp, Homo sapiens
caagacctctccccccg

SEQ ID NO: 709 - DNA, 17 bp, Homo sapiens
aagacctctccccccgc

SEQ ID NO: 710 - DNA, 17 bp, Homo sapiens
agacctctccccccgcc

SEQ ID NO: 711 - DNA, 17 bp, Homo sapiens
gacctctccccccgcca

SEQ ID NO: 712 - DNA, 17 bp, Homo sapiens
acctctccccccgccac

SEQ ID NO: 713 - DNA, 17 bp, Homo sapiens
cctctccccccgccaca

SEQ ID NO: 714 - DNA, 17 bp, Homo sapiens
ctctccccccgccacag

SEQ ID NO: 715 - DNA, 17 bp, Homo sapiens
tctccccccgccacaga

SEQ ID NO: 716 - DNA, 17 bp, Homo sapiens
ctccccccgccacagat

SEQ ID NO: 717 - DNA, 17 bp, Homo sapiens
tccccccgccacagata

SEQ ID NO: 718 - DNA, 17 bp, Homo sapiens
ccccccgccacagatac

SEQ ID NO: 719 - DNA, 17 bp, Homo sapiens
cccccgccacagatact

SEQ ID NO: 720 - DNA, 17 bp, Homo sapiens
ccccgccacagatactg

SEQ ID NO: 721 - DNA, 17 bp, Homo sapiens
cccgccacagatactgg

SEQ ID NO: 722 - DNA, 17 bp, Homo sapiens
ccgccacagatactgga

SEQ ID NO: 723 - DNA, 17 bp, Homo sapiens
cgccacagatactggaa

SEQ ID NO: 724 - DNA, 17 bp, Homo sapiens
gccacagatactggaaa

SEQ ID NO: 725 - DNA, 17 bp, Homo sapiens
ccacagatactggaaag

SEQ ID NO: 726 - DNA, 17 bp, Homo sapiens
cacagatactggaaagg

SEQ ID NO: 727 - DNA, 17 bp, Homo sapiens
acagatactggaaagga

SEQ ID NO: 728 - DNA, 17 bp, Homo sapiens
cagatactggaaaggaa

SEQ ID NO: 729 - DNA, 17 bp, Homo sapiens
agatactggaaaggaaa

SEQ ID NO: 730 - DNA, 17 bp, Homo sapiens
gatactggaaaggaaaa

SEQ ID NO: 731 - DNA, 17 bp, Homo sapiens
atactggaaaggaaaag

SEQ ID NO: 732 - DNA, 17 bp, Homo sapiens
tactggaaaggaaaaga

SEQ ID NO: 733 - DNA, 17 bp, Homo sapiens
actggaaaggaaaagaa

SEQ ID NO: 734 - DNA, 17 bp, Homo sapiens
ctggaaaggaaaagaaa

SEQ ID NO: 735 - DNA, 17 bp, Homo sapiens
tggaaaggaaaagaaag

SEQ ID NO: 736 - DNA, 17 bp, Homo sapiens
ggaaaggaaaagaaagg

SEQ ID NO: 737 - DNA, 17 bp, Homo sapiens
gaaaggaaaagaaaggg

SEQ ID NO: 738 - DNA, 17 bp, Homo sapiens
aaaggaaaagaaagggg

SEQ ID NO: 739 - DNA, 17 bp, Homo sapiens
aaggaaaagaaagggga

SEQ ID NO: 740 - DNA, 17 bp, Homo sapiens
aggaaaagaaaggggag

SEQ ID NO: 741 - DNA, 17 bp, Homo sapiens
ggaaaagaaaggggaga

SEQ ID NO: 742 - DNA, 17 bp, Homo sapiens
gaaaagaaaggggagac

SEQ ID NO: 743 - DNA, 17 bp, Homo sapiens
aaaagaaaggggagacc

SEQ ID NO: 744 - DNA, 17 bp, Homo sapiens
aaagaaaggggagacct

SEQ ID NO: 745 - DNA, 17 bp, Homo sapiens
aagaaaggggagacctc

SEQ ID NO: 746 - DNA, 17 bp, Homo sapiens
agaaaggggagacctct

SEQ ID NO: 747 - DNA, 17 bp, Homo sapiens
gaaaggggagacctcta

SEQ ID NO: 748 - DNA, 17 bp, Homo sapiens
aaaggggagacctctag

SEQ ID NO: 749 - DNA, 17 bp, Homo sapiens
aaggggagacctctagg

SEQ ID NO: 750 - DNA, 17 bp, Homo sapiens
aggggagacctctagga

SEQ ID NO: 751 - DNA, 17 bp, Homo sapiens
ggggagacctctaggac

SEQ ID NO: 752 - DNA, 17 bp, Homo sapiens
gggagacctctaggact

SEQ ID NO: 753 - DNA, 17 bp, Homo sapiens
ggagacctctaggactc

SEQ ID NO: 754 - DNA, 17 bp, Homo sapiens
gagacctctaggactcc

SEQ ID NO: 755 - DNA, 17 bp, Homo sapiens
agacctctaggactcct

SEQ ID NO: 756 - DNA, 17 bp, Homo sapiens
gacctctaggactcctt

SEQ ID NO: 757 - DNA, 17 bp, Homo sapiens
acctctaggactccttg

SEQ ID NO: 758 - DNA, 17 bp, Homo sapiens
cctctaggactccttgt

SEQ ID NO: 759 - DNA, 17 bp, Homo sapiens
ctctaggactccttgtg

SEQ ID NO: 760 - DNA, 17 bp, Homo sapiens
tctaggactccttgtgg

SEQ ID NO: 761 - DNA, 17 bp, Homo sapiens
ctaggactccttgtggc

SEQ ID NO: 762 - DNA, 17 bp, Homo sapiens
taggactccttgtggct

SEQ ID NO: 763 - DNA, 17 bp, Homo sapiens
aggactccttgtggctc

SEQ ID NO: 764 - DNA, 17 bp, Homo sapiens
ggactccttgtggctcc

SEQ ID NO: 765 - DNA, 17 bp, Homo sapiens
gactccttgtggctccc

SEQ ID NO: 766 - DNA, 17 bp, Homo sapiens
actccttgtggctccca

SEQ ID NO: 767 - DNA, 17 bp, Homo sapiens
ctccttgtggctcccag

SEQ ID NO: 768 - DNA, 17 bp, Homo sapiens
tccttgtggctcccagg

SEQ ID NO: 769 - DNA, 17 bp, Homo sapiens
ccttgtggctcccaggc

SEQ ID NO: 770 - DNA, 17 bp, Homo sapiens
cttgtggctcccaggcc

SEQ ID NO: 771 - DNA, 17 bp, Homo sapiens
ttgtggctcccaggcca

SEQ ID NO: 772 - DNA, 17 bp, Homo sapiens
tgtggctcccaggccag

SEQ ID NO: 773 - DNA, 17 bp, Homo sapiens
gtggctcccaggccagc

SEQ ID NO: 774 - DNA, 17 bp, Homo sapiens
tggctcccaggccagca

SEQ ID NO: 775 - DNA, 17 bp, Homo sapiens
ggctcccaggccagcac

SEQ ID NO: 776 - DNA, 17 bp, Homo sapiens
gctcccaggccagcacc

SEQ ID NO: 777 - DNA, 17 bp, Homo sapiens
ctcccaggccagcaccg

SEQ ID NO: 778 - DNA, 17 bp, Homo sapiens
tcccaggccagcaccga

SEQ ID NO: 779 - DNA, 17 bp, Homo sapiens
cccaggccagcaccgag

SEQ ID NO: 780 - DNA, 17 bp, Homo sapiens
ccaggccagcaccgaga

SEQ ID NO: 781 - DNA, 17 bp, Homo sapiens
caggccagcaccgagat

SEQ ID NO: 782 - DNA, 17 bp, Homo sapiens
aggccagcaccgagatc

SEQ ID NO: 783 - DNA, 17 bp, Homo sapiens
ggccagcaccgagatct

SEQ ID NO: 784 - DNA, 17 bp, Homo sapiens
gccagcaccgagatctt

SEQ ID NO: 785 - DNA, 17 bp, Homo sapiens
ccagcaccgagatcttg

SEQ ID NO: 786 - DNA, 17 bp, Homo sapiens
cagcaccgagatcttgg

SEQ ID NO: 787 - DNA, 17 bp, Homo sapiens
agcaccgagatcttggc

SEQ ID NO: 788 - DNA, 17 bp, Homo sapiens
gcaccgagatcttggcc

SEQ ID NO: 789 - DNA, 17 bp, Homo sapiens
caccgagatcttggccc

SEQ ID NO: 790 - DNA, 17 bp, Homo sapiens
accgagatcttggcccc

SEQ ID NO: 791 - DNA, 17 bp, Homo sapiens
ccgagatcttggccccg

SEQ ID NO: 792 - DNA, 17 bp, Homo sapiens
cgagatcttggccccga

SEQ ID NO: 793 - DNA, 17 bp, Homo sapiens
gagatcttggccccgaa

SEQ ID NO: 794 - DNA, 17 bp, Homo sapiens
agatcttggccccgaaa

SEQ ID NO: 795 - DNA, 17 bp, Homo sapiens
gatcttggccccgaaag

SEQ ID NO: 796 - DNA, 17 bp, Homo sapiens
atcttggccccgaaagc

SEQ ID NO: 797 - DNA, 17 bp, Homo sapiens
tcttggccccgaaagct

SEQ ID NO: 798 - DNA, 17 bp, Homo sapiens
cttggccccgaaagctg

SEQ ID NO: 799 - DNA, 17 bp, Homo sapiens
ttggccccgaaagctga

SEQ ID NO: 800 - DNA, 17 bp, Homo sapiens
tggccccgaaagctgag

SEQ ID NO: 801 - DNA, 17 bp, Homo sapiens
ggccccgaaagctgaga

SEQ ID NO: 802 - DNA, 17 bp, Homo sapiens
gccccgaaagctgagaa

SEQ ID NO: 803 - DNA, 17 bp, Homo sapiens
ccccgaaagctgagaag

SEQ ID NO: 804 - DNA, 17 bp, Homo sapiens
cccgaaagctgagaaga

SEQ ID NO: 805 - DNA, 17 bp, Homo sapiens
ccgaaagctgagaagac

SEQ ID NO: 806 - DNA, 17 bp, Homo sapiens
cgaaagctgagaagacc

SEQ ID NO: 807 - DNA, 17 bp, Homo sapiens
gaaagctgagaagaccc

SEQ ID NO: 808 - DNA, 17 bp, Homo sapiens
aaagctgagaagacccg

SEQ ID NO: 809 - DNA, 17 bp, Homo sapiens
aagctgagaagacccgg

SEQ ID NO: 810 - DNA, 17 bp, Homo sapiens
agctgagaagacccgga

SEQ ID NO: 811 - DNA, 17 bp, Homo sapiens
gctgagaagacccggac

SEQ ID NO: 812 - DNA, 17 bp, Homo sapiens
ctgagaagacccggact

SEQ ID NO: 813 - DNA, 17 bp, Homo sapiens
tgagaagacccggactg

SEQ ID NO: 814 - DNA, 17 bp, Homo sapiens
gagaagacccggactgg

SEQ ID NO: 815 - DNA, 17 bp, Homo sapiens
agaagacccggactggg

SEQ ID NO: 816 - DNA, 17 bp, Homo sapiens
gaagacccggactgggg

SEQ ID NO: 817 - DNA, 17 bp, Homo sapiens
aagacccggactggggg

SEQ ID NO: 818 - DNA, 17 bp, Homo sapiens
agacccggactgggggt

SEQ ID NO: 819 - DNA, 17 bp, Homo sapiens
gacccggactgggggtc

SEQ ID NO: 820 - DNA, 17 bp, Homo sapiens
acccggactgggggtct

SEQ ID NO: 821 - DNA, 17 bp, Homo sapiens
cccggactgggggtctt

SEQ ID NO: 822 - DNA, 17 bp, Homo sapiens
ccggactgggggtcttg

SEQ ID NO: 823 - DNA, 17 bp, Homo sapiens
cggactgggggtcttgg

SEQ ID NO: 824 - DNA, 17 bp, Homo sapiens
ggactgggggtcttggg

SEQ ID NO: 825 - DNA, 17 bp, Homo sapiens
gactgggggtcttgggg

SEQ ID NO: 826 - DNA, 17 bp, Homo sapiens
actgggggtcttgggga

SEQ ID NO: 827 - DNA, 17 bp, Homo sapiens
ctgggggtcttggggac

SEQ ID NO: 828 - DNA, 17 bp, Homo sapiens
tgggggtcttggggacc

SEQ ID NO: 829 - DNA, 17 bp, Homo sapiens
gggggtcttggggaccc

SEQ ID NO: 830 - DNA, 17 bp, Homo sapiens
ggggtcttggggaccca

SEQ ID NO: 831 - DNA, 17 bp, Homo sapiens
gggtcttggggacccag

SEQ ID NO: 832 - DNA, 17 bp, Homo sapiens
ggtcttggggacccagg

SEQ ID NO: 833 - DNA, 17 bp, Homo sapiens
gtcttggggacccaggc

SEQ ID NO: 834 - DNA, 17 bp, Homo sapiens
tcttggggacccaggcc

SEQ ID NO: 835 - DNA, 17 bp, Homo sapiens
cttggggacccaggcca

SEQ ID NO: 836 - DNA, 17 bp, Homo sapiens
ttggggacccaggccaa

SEQ ID NO: 837 - DNA, 17 bp, Homo sapiens
tggggacccaggccaag

SEQ ID NO: 838 - DNA, 17 bp, Homo sapiens
ggggacccaggccaagg

SEQ ID NO: 839 - DNA, 17 bp, Homo sapiens
gggacccaggccaagga

SEQ ID NO: 840 - DNA, 17 bp, Homo sapiens
ggacccaggccaaggaa

SEQ ID NO: 841 - DNA, 17 bp, Homo sapiens
gacccaggccaaggaac

SEQ ID NO: 842 - DNA, 17 bp, Homo sapiens
acccaggccaaggaact

SEQ ID NO: 843 - DNA, 17 bp, Homo sapiens
cccaggccaaggaactg

SEQ ID NO: 844 - DNA, 17 bp, Homo sapiens
ccaggccaaggaactgt

SEQ ID NO: 845 - DNA, 17 bp, Homo sapiens
caggccaaggaactgtg

SEQ ID NO: 846 - DNA, 17 bp, Homo sapiens
aggccaaggaactgtgg

SEQ ID NO: 847 - DNA, 17 bp, Homo sapiens
ggccaaggaactgtggc

SEQ ID NO: 848 - DNA, 17 bp, Homo sapiens
gccaaggaactgtggca

SEQ ID NO: 849 - DNA, 17 bp, Homo sapiens
ccaaggaactgtggcac

SEQ ID NO: 850 - DNA, 17 bp, Homo sapiens
caaggaactgtggcact

SEQ ID NO: 851 - DNA, 17 bp, Homo sapiens
aaggaactgtggcactg

SEQ ID NO: 852 - DNA, 17 bp, Homo sapiens
aggaactgtggcactga

SEQ ID NO: 853 - DNA, 17 bp, Homo sapiens
ggaactgtggcactgaa

SEQ ID NO: 854 - DNA, 17 bp, Homo sapiens
gaactgtggcactgaaa

SEQ ID NO: 855 - DNA, 17 bp, Homo sapiens
aactgtggcactgaaaa

SEQ ID NO: 856 - DNA, 17 bp, Homo sapiens
actgtggcactgaaaaa

SEQ ID NO: 857 - DNA, 17 bp, Homo sapiens
ctgtggcactgaaaaaa

SEQ ID NO: 858 - DNA, 17 bp, Homo sapiens
tgtggcactgaaaaaag

SEQ ID NO: 859 - DNA, 17 bp, Homo sapiens
gtggcactgaaaaaagg

SEQ ID NO: 860 - DNA, 17 bp, Homo sapiens
tggcactgaaaaaaggc

SEQ ID NO: 861 - DNA, 17 bp, Homo sapiens
ggcactgaaaaaaggcg

SEQ ID NO: 862 - DNA, 17 bp, Homo sapiens
gcactgaaaaaaggcga

SEQ ID NO: 863 - DNA, 17 bp, Homo sapiens
cactgaaaaaaggcgag

SEQ ID NO: 864 - DNA, 17 bp, Homo sapiens
actgaaaaaaggcgagg

SEQ ID NO: 865 - DNA, 17 bp, Homo sapiens
ctgaaaaaaggcgagga

SEQ ID NO: 866 - DNA, 17 bp, Homo sapiens
tgaaaaaaggcgaggag

SEQ ID NO: 867 - DNA, 17 bp, Homo sapiens
gaaaaaaggcgaggagg

SEQ ID NO: 868 - DNA, 17 bp, Homo sapiens
aaaaaaggcgaggaggg

SEQ ID NO: 869 - DNA, 17 bp, Homo sapiens
aaaaaggcgaggagggt

SEQ ID NO: 870 - DNA, 17 bp, Homo sapiens
aaaaggcgaggagggtc

SEQ ID NO: 871 - DNA, 17 bp, Homo sapiens
aaaggcgaggagggtca

SEQ ID NO: 872 - DNA, 17 bp, Homo sapiens
aaggcgaggagggtcaa

SEQ ID NO: 873 - DNA, 17 bp, Homo sapiens
aggcgaggagggtcaaa

SEQ ID NO: 874 - DNA, 17 bp, Homo sapiens
ggcgaggagggtcaaag

SEQ ID NO: 875 - DNA, 17 bp, Homo sapiens
gcgaggagggtcaaagc

SEQ ID NO: 876 - DNA, 17 bp, Homo sapiens
cgaggagggtcaaagca

SEQ ID NO: 877 - DNA, 17 bp, Homo sapiens
gaggagggtcaaagcat

SEQ ID NO: 878 - DNA, 17 bp, Homo sapiens
aggagggtcaaagcata

SEQ ID NO: 879 - DNA, 17 bp, Homo sapiens
ggagggtcaaagcatag

SEQ ID NO: 880 - DNA, 17 bp, Homo sapiens
gagggtcaaagcatagt

SEQ ID NO: 881 - DNA, 17 bp, Homo sapiens
agggtcaaagcatagtg

SEQ ID NO: 882 - DNA, 17 bp, Homo sapiens
gggtcaaagcatagtgg

SEQ ID NO: 883 - DNA, 17 bp, Homo sapiens
ggtcaaagcatagtggg

SEQ ID NO: 884 - DNA, 17 bp, Homo sapiens
gtcaaagcatagtgggg

SEQ ID NO: 885 - DNA, 17 bp, Homo sapiens
tcaaagcatagtgggga

SEQ ID NO: 886 - DNA, 17 bp, Homo sapiens
caaagcatagtggggaa

SEQ ID NO: 887 - DNA, 17 bp, Homo sapiens
aaagcatagtggggaag

SEQ ID NO: 888 - DNA, 17 bp, Homo sapiens
aagcatagtggggaagg

SEQ ID NO: 889 - DNA, 17 bp, Homo sapiens
agcatagtggggaaggg

SEQ ID NO: 890 - DNA, 17 bp, Homo sapiens
gcatagtggggaagggg

SEQ ID NO: 891 - DNA, 17 bp, Homo sapiens
catagtggggaaggggc

SEQ ID NO: 892 - DNA, 17 bp, Homo sapiens
atagtggggaaggggct

SEQ ID NO: 893 - DNA, 17 bp, Homo sapiens
tagtggggaaggggctt

SEQ ID NO: 894 - DNA, 17 bp, Homo sapiens
agtggggaaggggcttg

SEQ ID NO: 895 - DNA, 17 bp, Homo sapiens
gtggggaaggggcttgg

SEQ ID NO: 896 - DNA, 17 bp, Homo sapiens
tggggaaggggcttggg

SEQ ID NO: 897 - DNA, 17 bp, Homo sapiens
ggggaaggggcttggga

SEQ ID NO: 898 - DNA, 17 bp, Homo sapiens
gggaaggggcttgggac

SEQ ID NO: 899 - DNA, 17 bp, Homo sapiens
ggaaggggcttgggacc

SEQ ID NO: 900 - DNA, 17 bp, Homo sapiens
gaaggggcttgggaccc

SEQ ID NO: 901 - DNA, 17 bp, Homo sapiens
aaggggcttgggacccc

SEQ ID NO: 902 - DNA, 17 bp, Homo sapiens
aggggcttgggaccccc

SEQ ID NO: 903 - DNA, 17 bp, Homo sapiens
ggggcttgggaccccca

SEQ ID NO: 904 - DNA, 17 bp, Homo sapiens
gggcttgggacccccaa

SEQ ID NO: 905 - DNA, 17 bp, Homo sapiens
ggcttgggacccccaag

SEQ ID NO: 906 - DNA, 17 bp, Homo sapiens
gcttgggacccccaaga

SEQ ID NO: 907 - DNA, 17 bp, Homo sapiens
cttgggacccccaagac

SEQ ID NO: 908 - DNA, 17 bp, Homo sapiens
ttgggacccccaagacc

SEQ ID NO: 909 - DNA, 17 bp, Homo sapiens
tgggacccccaagacca

SEQ ID NO: 910 - DNA, 17 bp, Homo sapiens
gggacccccaagaccac

SEQ ID NO: 911 - DNA, 17 bp, Homo sapiens
ggacccccaagaccaca

SEQ ID NO: 912 - DNA, 17 bp, Homo sapiens
gacccccaagaccacag

SEQ ID NO: 913 - DNA, 17 bp, Homo sapiens
acccccaagaccacaga

SEQ ID NO: 914 - DNA, 17 bp, Homo sapiens
cccccaagaccacagag

SEQ ID NO: 915 - DNA, 17 bp, Homo sapiens
ccccaagaccacagagc

SEQ ID NO: 916 - DNA, 17 bp, Homo sapiens
cccaagaccacagagct

SEQ ID NO: 917 - DNA, 17 bp, Homo sapiens
ccaagaccacagagctg

SEQ ID NO: 918 - DNA, 17 bp, Homo sapiens
caagaccacagagctga

SEQ ID NO: 919 - DNA, 17 bp, Homo sapiens
aagaccacagagctgaa

SEQ ID NO: 920 - DNA, 17 bp, Homo sapiens
agaccacagagctgaaa

SEQ ID NO: 921 - DNA, 17 bp, Homo sapiens
gaccacagagctgaaag

SEQ ID NO: 922 - DNA, 17 bp, Homo sapiens
accacagagctgaaaga

SEQ ID NO: 923 - DNA, 17 bp, Homo sapiens
ccacagagctgaaagag

SEQ ID NO: 924 - DNA, 17 bp, Homo sapiens
cacagagctgaaagagg

SEQ ID NO: 925 - DNA, 17 bp, Homo sapiens
acagagctgaaagaggc

SEQ ID NO: 926 - DNA, 17 bp, Homo sapiens
cagagctgaaagaggct

SEQ ID NO: 927 - DNA, 17 bp, Homo sapiens
agagctgaaagaggctg

SEQ ID NO: 928 - DNA, 17 bp, Homo sapiens
gagctgaaagaggctga

SEQ ID NO: 929 - DNA, 17 bp, Homo sapiens
agctgaaagaggctgag

SEQ ID NO: 930 - DNA, 17 bp, Homo sapiens
gctgaaagaggctgagc

SEQ ID NO: 931 - DNA, 17 bp, Homo sapiens
ctgaaagaggctgagcc

SEQ ID NO: 932 - DNA, 17 bp, Homo sapiens
tgaaagaggctgagccc

SEQ ID NO: 933 - DNA, 17 bp, Homo sapiens
gaaagaggctgagcccc

SEQ ID NO: 934 - DNA, 17 bp, Homo sapiens
aaagaggctgagcccca

SEQ ID NO: 935 - DNA, 17 bp, Homo sapiens
aagaggctgagccccag

SEQ ID NO: 936 - DNA, 17 bp, Homo sapiens
agaggctgagccccagg

SEQ ID NO: 937 - DNA, 17 bp, Homo sapiens
gaggctgagccccaggg

SEQ ID NO: 938 - DNA, 17 bp, Homo sapiens
aggctgagccccagggc

SEQ ID NO: 939 - DNA, 17 bp, Homo sapiens
ggctgagccccagggca

SEQ ID NO: 940 - DNA, 17 bp, Homo sapiens
gctgagccccagggcaa

SEQ ID NO: 941 - DNA, 17 bp, Homo sapiens
ctgagccccagggcaaa

SEQ ID NO: 942 - DNA, 17 bp, Homo sapiens
tgagccccagggcaaag

SEQ ID NO: 943 - DNA, 17 bp, Homo sapiens
gagccccagggcaaaga

SEQ ID NO: 944 - DNA, 17 bp, Homo sapiens
agccccagggcaaagac

SEQ ID NO: 945 - DNA, 17 bp, Homo sapiens
gccccagggcaaagaca

SEQ ID NO: 946 - DNA, 17 bp, Homo sapiens
ccccagggcaaagacag

SEQ ID NO: 947 - DNA, 17 bp, Homo sapiens
cccagggcaaagacagg

SEQ ID NO: 948 - DNA, 17 bp, Homo sapiens
ccagggcaaagacaggc

SEQ ID NO: 949 - DNA, 17 bp, Homo sapiens
cagggcaaagacaggca

SEQ ID NO: 950 - DNA, 17 bp, Homo sapiens
agggcaaagacaggcag

SEQ ID NO: 951 - DNA, 17 bp, Homo sapiens
gggcaaagacaggcagg

SEQ ID NO: 952 - DNA, 17 bp, Homo sapiens
ggcaaagacaggcaggg

SEQ ID NO: 953 - DNA, 17 bp, Homo sapiens
gcaaagacaggcagggg

SEQ ID NO: 954 - DNA, 17 bp, Homo sapiens
caaagacaggcagggga

SEQ ID NO: 955 - DNA, 17 bp, Homo sapiens
aaagacaggcaggggac

SEQ ID NO: 956 - DNA, 17 bp, Homo sapiens
aagacaggcaggggacc

SEQ ID NO: 957 - DNA, 17 bp, Homo sapiens
agacaggcaggggacca

SEQ ID NO: 958 - DNA, 17 bp, Homo sapiens
gacaggcaggggaccag

SEQ ID NO: 959 - DNA, 17 bp, Homo sapiens
acaggcaggggaccagg

SEQ ID NO: 960 - DNA, 17 bp, Homo sapiens
caggcaggggaccaggc

SEQ ID NO: 961 - DNA, 17 bp, Homo sapiens
aggcaggggaccaggcc

SEQ ID NO: 962 - DNA, 17 bp, Homo sapiens
ggcaggggaccaggccc

SEQ ID NO: 963 - DNA, 17 bp, Homo sapiens
gcaggggaccaggcccc

SEQ ID NO: 964 - DNA, 17 bp, Homo sapiens
caggggaccaggcccca

SEQ ID NO: 965 - DNA, 17 bp, Homo sapiens
aggggaccaggccccaa

SEQ ID NO: 966 - DNA, 17 bp, Homo sapiens
ggggaccaggccccaag

SEQ ID NO: 967 - DNA, 17 bp, Homo sapiens
gggaccaggccccaagc

SEQ ID NO: 968 - DNA, 17 bp, Homo sapiens
ggaccaggccccaagcc

SEQ ID NO: 969 - DNA, 17 bp, Homo sapiens
gaccaggccccaagccc

SEQ ID NO: 970 - DNA, 17 bp, Homo sapiens
accaggccccaagccca

SEQ ID NO: 971 - DNA, 17 bp, Homo sapiens
ccaggccccaagcccaa

SEQ ID NO: 972 - DNA, 17 bp, Homo sapiens
caggccccaagcccaag

SEQ ID NO: 973 - DNA, 17 bp, Homo sapiens
aggccccaagcccaagg

SEQ ID NO: 974 - DNA, 17 bp, Homo sapiens
ggccccaagcccaaggg

SEQ ID NO: 975 - DNA, 17 bp, Homo sapiens
gccccaagcccaagggc

SEQ ID NO: 976 - DNA, 17 bp, Homo sapiens
ccccaagcccaagggcc

SEQ ID NO: 977 - DNA, 17 bp, Homo sapiens
cccaagcccaagggccc

SEQ ID NO: 978 - DNA, 17 bp, Homo sapiens
ccaagcccaagggcccg

SEQ ID NO: 979 - DNA, 17 bp, Homo sapiens
caagcccaagggcccgg

SEQ ID NO: 980 - DNA, 17 bp, Homo sapiens
aagcccaagggcccggc

SEQ ID NO: 981 - DNA, 17 bp, Homo sapiens
agcccaagggcccggcg

SEQ ID NO: 982 - DNA, 17 bp, Homo sapiens
gcccaagggcccggcga

SEQ ID NO: 983 - DNA, 17 bp, Homo sapiens
cccaagggcccggcgag

SEQ ID NO: 984 - DNA, 17 bp, Homo sapiens
ccaagggcccggcgagg

SEQ ID NO: 985 - DNA, 17 bp, Homo sapiens
caagggcccggcgaggg

SEQ ID NO: 986 - DNA, 17 bp, Homo sapiens
aagggcccggcgagggg

SEQ ID NO: 987 - DNA, 17 bp, Homo sapiens
agggcccggcgaggggg

SEQ ID NO: 988 - DNA, 17 bp, Homo sapiens
gggcccggcgagggggt

SEQ ID NO: 989 - DNA, 17 bp, Homo sapiens
ggcccggcgagggggtg

SEQ ID NO: 990 - DNA, 17 bp, Homo sapiens
gcccggcgagggggtgc

SEQ ID NO: 991 - DNA, 17 bp, Homo sapiens
cccggcgagggggtgcg

SEQ ID NO: 992 - DNA, 17 bp, Homo sapiens
ccggcgagggggtgcga

SEQ ID NO: 993 - DNA, 17 bp, Homo sapiens
cggcgagggggtgcgac

SEQ ID NO: 994 - DNA, 17 bp, Homo sapiens
ggcgagggggtgcgacc

SEQ ID NO: 995 - DNA, 17 bp, Homo sapiens
gcgagggggtgcgacca

SEQ ID NO: 996 - DNA, 17 bp, Homo sapiens
cgagggggtgcgaccag

SEQ ID NO: 997 - DNA, 17 bp, Homo sapiens
gagggggtgcgaccagg

SEQ ID NO: 998 - DNA, 17 bp, Homo sapiens
agggggtgcgaccaggg

SEQ ID NO: 999 - DNA, 17 bp, Homo sapiens
gggggtgcgaccaggga

SEQ ID NO: 1000 - DNA, 17 bp, Homo sapiens
ggggtgcgaccagggaa

SEQ ID NO: 1001 - DNA, 17 bp, Homo sapiens
gggtgcgaccagggaaa

SEQ ID NO: 1002 - DNA, 17 bp, Homo sapiens
ggtgcgaccagggaaag

SEQ ID NO: 1003 - DNA, 17 bp, Homo sapiens
gtgcgaccagggaaagc

SEQ ID NO: 1004 - DNA, 17 bp, Homo sapiens
tgcgaccagggaaagca

SEQ ID NO: 1005 - DNA, 17 bp, Homo sapiens
gcgaccagggaaagcag

SEQ ID NO: 1006 - DNA, 17 bp, Homo sapiens
cgaccagggaaagcaga

SEQ ID NO: 1007 - DNA, 17 bp, Homo sapiens
gaccagggaaagcagag

SEQ ID NO: 1008 - DNA, 17 bp, Homo sapiens
accagggaaagcagaga

SEQ ID NO: 1009 - DNA, 17 bp, Homo sapiens
ccagggaaagcagagaa

SEQ ID NO: 1010 - DNA, 17 bp, Homo sapiens
cagggaaagcagagaag

SEQ ID NO: 1011 - DNA, 17 bp, Homo sapiens
agggaaagcagagaagg

SEQ ID NO: 1012 - DNA, 17 bp, Homo sapiens
gggaaagcagagaagga

SEQ ID NO: 1013 - DNA, 17 bp, Homo sapiens
ggaaagcagagaaggag

SEQ ID NO: 1014 - DNA, 17 bp, Homo sapiens
gaaagcagagaaggagg

SEQ ID NO: 1015 - DNA, 17 bp, Homo sapiens
aaagcagagaaggaggg

SEQ ID NO: 1016 - DNA, 17 bp, Homo sapiens
aagcagagaaggaggga

SEQ ID NO: 1017 - DNA, 17 bp, Homo sapiens
agcagagaaggagggag

SEQ ID NO: 1018 - DNA, 17 bp, Homo sapiens
gcagagaaggagggagc

SEQ ID NO: 1019 - DNA, 17 bp, Homo sapiens
cagagaaggagggagca

SEQ ID NO: 1020 - DNA, 17 bp, Homo sapiens
agagaaggagggagcag

SEQ ID NO: 1021 - DNA, 17 bp, Homo sapiens
gagaaggagggagcaga

SEQ ID NO: 1022 - DNA, 17 bp, Homo sapiens
agaaggagggagcagag

SEQ ID NO: 1023 - DNA, 17 bp, Homo sapiens
gaaggagggagcagagc

SEQ ID NO: 1024 - DNA, 17 bp, Homo sapiens
aaggagggagcagagcc

SEQ ID NO: 1025 - DNA, 17 bp, Homo sapiens
aggagggagcagagccc

SEQ ID NO: 1026 - DNA, 17 bp, Homo sapiens
ggagggagcagagccca

SEQ ID NO: 1027 - DNA, 17 bp, Homo sapiens
gagggagcagagcccac

SEQ ID NO: 1028 - DNA, 17 bp, Homo sapiens
agggagcagagcccaca

SEQ ID NO: 1029 - DNA, 17 bp, Homo sapiens
gggagcagagcccacaa

SEQ ID NO: 1030 - DNA, 17 bp, Homo sapiens
ggagcagagcccacaaa

SEQ ID NO: 1031 - DNA, 17 bp, Homo sapiens
gagcagagcccacaaac

SEQ ID NO: 1032 - DNA, 17 bp, Homo sapiens
agcagagcccacaaaca

SEQ ID NO: 1033 - DNA, 17 bp, Homo sapiens
gcagagcccacaaacac

SEQ ID NO: 1034 - DNA, 17 bp, Homo sapiens
cagagcccacaaacacg

SEQ ID NO: 1035 - DNA, 17 bp, Homo sapiens
agagcccacaaacacgg

SEQ ID NO: 1036 - DNA, 17 bp, Homo sapiens
gagcccacaaacacggt

SEQ ID NO: 1037 - DNA, 17 bp, Homo sapiens
agcccacaaacacggtg

SEQ ID NO: 1038 - DNA, 17 bp, Homo sapiens
gcccacaaacacggtgg

SEQ ID NO: 1039 - DNA, 17 bp, Homo sapiens
cccacaaacacggtgga

SEQ ID NO: 1040 - DNA, 17 bp, Homo sapiens
ccacaaacacggtggaa

SEQ ID NO: 1041 - DNA, 17 bp, Homo sapiens
cacaaacacggtggaaa

SEQ ID NO: 1042 - DNA, 17 bp, Homo sapiens
acaaacacggtggaaaa

SEQ ID NO: 1043 - DNA, 17 bp, Homo sapiens
caaacacggtggaaaag

SEQ ID NO: 1044 - DNA, 17 bp, Homo sapiens
aaacacggtggaaaagg

SEQ ID NO: 1045 - DNA, 17 bp, Homo sapiens
aacacggtggaaaaggg

SEQ ID NO: 1046 - DNA, 17 bp, Homo sapiens
acacggtggaaaagggg

SEQ ID NO: 1047 - DNA, 17 bp, Homo sapiens
cacggtggaaaagggga

SEQ ID NO: 1048 - DNA, 17 bp, Homo sapiens
acggtggaaaaggggaa

SEQ ID NO: 1049 - DNA, 17 bp, Homo sapiens
cggtggaaaaggggaat

SEQ ID NO: 1050 - DNA, 17 bp, Homo sapiens
ggtggaaaaggggaatg

SEQ ID NO: 1051 - DNA, 17 bp, Homo sapiens
gtggaaaaggggaatgt

SEQ ID NO: 1052 - DNA, 17 bp, Homo sapiens
tggaaaaggggaatgtc

SEQ ID NO: 1053 - DNA, 17 bp, Homo sapiens
ggaaaaggggaatgtct

SEQ ID NO: 1054 - DNA, 17 bp, Homo sapiens
gaaaaggggaatgtctc

SEQ ID NO: 1055 - DNA, 17 bp, Homo sapiens
aaaaggggaatgtctct

SEQ ID NO: 1056 - DNA, 17 bp, Homo sapiens
aaaggggaatgtctcta

SEQ ID NO: 1057 - DNA, 17 bp, Homo sapiens
aaggggaatgtctctaa

SEQ ID NO: 1058 - DNA, 17 bp, Homo sapiens
aggggaatgtctctaag

SEQ ID NO: 1059 - DNA, 17 bp, Homo sapiens
ggggaatgtctctaagg

SEQ ID NO: 1060 - DNA, 17 bp, Homo sapiens
gggaatgtctctaagga

SEQ ID NO: 1061 - DNA, 17 bp, Homo sapiens
ggaatgtctctaaggac

SEQ ID NO: 1062 - DNA, 17 bp, Homo sapiens
gaatgtctctaaggacg

SEQ ID NO: 1063 - DNA, 17 bp, Homo sapiens
aatgtctctaaggacgt

SEQ ID NO: 1064 - DNA, 17 bp, Homo sapiens
atgtctctaaggacgta

SEQ ID NO: 1065 - DNA, 17 bp, Homo sapiens
tgtctctaaggacgtag

SEQ ID NO: 1066 - DNA, 17 bp, Homo sapiens
gtctctaaggacgtagg

SEQ ID NO: 1067 - DNA, 17 bp, Homo sapiens
tctctaaggacgtaggg

SEQ ID NO: 1068 - DNA, 17 bp, Homo sapiens
ctctaaggacgtaggga

SEQ ID NO: 1069 - DNA, 17 bp, Homo sapiens
tctaaggacgtagggag

SEQ ID NO: 1070 - DNA, 17 bp, Homo sapiens
ctaaggacgtagggagt

SEQ ID NO: 1071 - DNA, 17 bp, Homo sapiens
taaggacgtagggagtg

SEQ ID NO: 1072 - DNA, 17 bp, Homo sapiens
aaggacgtagggagtga

SEQ ID NO: 1073 - DNA, 17 bp, Homo sapiens
aggacgtagggagtgaa

SEQ ID NO: 1074 - DNA, 17 bp, Homo sapiens
ggacgtagggagtgaag

SEQ ID NO: 1075 - DNA, 17 bp, Homo sapiens
gacgtagggagtgaagg

SEQ ID NO: 1076 - DNA, 17 bp, Homo sapiens
acgtagggagtgaaggg

SEQ ID NO: 1077 - DNA, 17 bp, Homo sapiens
cgtagggagtgaaggga

SEQ ID NO: 1078 - DNA, 17 bp, Homo sapiens
gtagggagtgaagggaa

SEQ ID NO: 1079 - DNA, 17 bp, Homo sapiens
tagggagtgaagggaag

SEQ ID NO: 1080 - DNA, 17 bp, Homo sapiens
agggagtgaagggaagc

SEQ ID NO: 1081 - DNA, 17 bp, Homo sapiens
gggagtgaagggaagca

SEQ ID NO: 1082 - DNA, 17 bp, Homo sapiens
ggagtgaagggaagcac

SEQ ID NO: 1083 - DNA, 17 bp, Homo sapiens
gagtgaagggaagcacg

SEQ ID NO: 1084 - DNA, 17 bp, Homo sapiens
agtgaagggaagcacgt

SEQ ID NO: 1085 - DNA, 17 bp, Homo sapiens
gtgaagggaagcacgta

SEQ ID NO: 1086 - DNA, 17 bp, Homo sapiens
tgaagggaagcacgtaa

SEQ ID NO: 1087 - DNA, 17 bp, Homo sapiens
gaagggaagcacgtaag

SEQ ID NO: 1088 - DNA, 17 bp, Homo sapiens
aagggaagcacgtaagg

SEQ ID NO: 1089 - DNA, 17 bp, Homo sapiens
agggaagcacgtaaggc

SEQ ID NO: 1090 - DNA, 17 bp, Homo sapiens
gggaagcacgtaaggcc

SEQ ID NO: 1091 - DNA, 17 bp, Homo sapiens
ggaagcacgtaaggccc

SEQ ID NO: 1092 - DNA, 17 bp, Homo sapiens
gaagcacgtaaggcccc

SEQ ID NO: 1093 - DNA, 17 bp, Homo sapiens
aagcacgtaaggcccca

SEQ ID NO: 1094 - DNA, 17 bp, Homo sapiens
agcacgtaaggccccaa

SEQ ID NO: 1095 - DNA, 17 bp, Homo sapiens
gcacgtaaggccccaaa

SEQ ID NO: 1096 - DNA, 17 bp, Homo sapiens
cacgtaaggccccaaat

SEQ ID NO: 1097 - DNA, 17 bp, Homo sapiens
acgtaaggccccaaatc

SEQ ID NO: 1098 - DNA, 17 bp, Homo sapiens
cgtaaggccccaaatcc

SEQ ID NO: 1099 - DNA, 17 bp, Homo sapiens
gtaaggccccaaatccc

SEQ ID NO: 1100 - DNA, 17 bp, Homo sapiens
taaggccccaaatccct

SEQ ID NO: 1101 - DNA, 17 bp, Homo sapiens
aaggccccaaatccctg

SEQ ID NO: 1102 - DNA, 17 bp, Homo sapiens
aggccccaaatccctgg

SEQ ID NO: 1103 - DNA, 17 bp, Homo sapiens
ggccccaaatccctggg

SEQ ID NO: 1104 - DNA, 17 bp, Homo sapiens
gccccaaatccctggga

SEQ ID NO: 1105 - DNA, 17 bp, Homo sapiens
ccccaaatccctgggag

SEQ ID NO: 1106 - DNA, 17 bp, Homo sapiens
cccaaatccctgggaga

SEQ ID NO: 1107 - DNA, 17 bp, Homo sapiens
ccaaatccctgggagaa

SEQ ID NO: 1108 - DNA, 17 bp, Homo sapiens
caaatccctgggagaaa

SEQ ID NO: 1109 - DNA, 17 bp, Homo sapiens
aaatccctgggagaaag

SEQ ID NO: 1110 - DNA, 17 bp, Homo sapiens
aatccctgggagaaagt

SEQ ID NO: 1111 - DNA, 17 bp, Homo sapiens
atccctgggagaaagtg

SEQ ID NO: 1112 - DNA, 17 bp, Homo sapiens
tccctgggagaaagtgg

SEQ ID NO: 1113 - DNA, 17 bp, Homo sapiens
ccctgggagaaagtggg

SEQ ID NO: 1114 - DNA, 17 bp, Homo sapiens
cctgggagaaagtgggg

SEQ ID NO: 1115 - DNA, 17 bp, Homo sapiens
ctgggagaaagtgggga

SEQ ID NO: 1116 - DNA, 17 bp, Homo sapiens
tgggagaaagtggggag

SEQ ID NO: 1117 - DNA, 17 bp, Homo sapiens
gggagaaagtggggagg

SEQ ID NO: 1118 - DNA, 17 bp, Homo sapiens
ggagaaagtggggaggt

SEQ ID NO: 1119 - DNA, 17 bp, Homo sapiens
gagaaagtggggaggtt

SEQ ID NO: 1120 - DNA, 17 bp, Homo sapiens
agaaagtggggaggttt

SEQ ID NO: 1121 - DNA, 17 bp, Homo sapiens
gaaagtggggaggtttc

SEQ ID NO: 1122 - DNA, 17 bp, Homo sapiens
aaagtggggaggtttcc

SEQ ID NO: 1123 - DNA, 17 bp, Homo sapiens
aagtggggaggtttcct

SEQ ID NO: 1124 - DNA, 17 bp, Homo sapiens
agtggggaggtttcctg

SEQ ID NO: 1125 - DNA, 17 bp, Homo sapiens
gtggggaggtttcctgg

SEQ ID NO: 1126 - DNA, 17 bp, Homo sapiens
tggggaggtttcctggg

SEQ ID NO: 1127 - DNA, 17 bp, Homo sapiens
ggggaggtttcctggga

SEQ ID NO: 1128 - DNA, 17 bp, Homo sapiens
gggaggtttcctgggaa

SEQ ID NO: 1129 - DNA, 17 bp, Homo sapiens
ggaggtttcctgggaag

SEQ ID NO: 1130 - DNA, 17 bp, Homo sapiens
gaggtttcctgggaaga

SEQ ID NO: 1131 - DNA, 17 bp, Homo sapiens
aggtttcctgggaagaa

SEQ ID NO: 1132 - DNA, 17 bp, Homo sapiens
ggtttcctgggaagaag

SEQ ID NO: 1133 - DNA, 17 bp, Homo sapiens
gtttcctgggaagaagg

SEQ ID NO: 1134 - DNA, 17 bp, Homo sapiens
tttcctgggaagaagga

SEQ ID NO: 1135 - DNA, 17 bp, Homo sapiens
ttcctgggaagaaggag

SEQ ID NO: 1136 - DNA, 17 bp, Homo sapiens
tcctgggaagaaggagt

SEQ ID NO: 1137 - DNA, 17 bp, Homo sapiens
cctgggaagaaggagta

SEQ ID NO: 1138 - DNA, 17 bp, Homo sapiens
ctgggaagaaggagtaa

SEQ ID NO: 1139 - DNA, 17 bp, Homo sapiens
tgggaagaaggagtaag

SEQ ID NO: 1140 - DNA, 17 bp, Homo sapiens
gggaagaaggagtaagt

SEQ ID NO: 1141 - DNA, 17 bp, Homo sapiens
ggaagaaggagtaagtg

SEQ ID NO: 1142 - DNA, 17 bp, Homo sapiens
gaagaaggagtaagtgg

SEQ ID NO: 1143 - DNA, 17 bp, Homo sapiens
aagaaggagtaagtggg

SEQ ID NO: 1144 - DNA, 17 bp, Homo sapiens
agaaggagtaagtggga

SEQ ID NO: 1145 - DNA, 17 bp, Homo sapiens
gaaggagtaagtgggac

SEQ ID NO: 1146 - DNA, 17 bp, Homo sapiens
aaggagtaagtgggacg

SEQ ID NO: 1147 - DNA, 17 bp, Homo sapiens
aggagtaagtgggacgg

SEQ ID NO: 1148 - DNA, 17 bp, Homo sapiens
ggagtaagtgggacggt

SEQ ID NO: 1149 - DNA, 17 bp, Homo sapiens
gagtaagtgggacggtc

SEQ ID NO: 1150 - DNA, 17 bp, Homo sapiens
agtaagtgggacggtcc

SEQ ID NO: 1151 - DNA, 17 bp, Homo sapiens
gtaagtgggacggtccc

SEQ ID NO: 1152 - DNA, 17 bp, Homo sapiens
taagtgggacggtcccc

SEQ ID NO: 1153 - DNA, 17 bp, Homo sapiens
aagtgggacggtcccca

SEQ ID NO: 1154 - DNA, 17 bp, Homo sapiens
agtgggacggtccccag

SEQ ID NO: 1155 - DNA, 17 bp, Homo sapiens
gtgggacggtccccaga

SEQ ID NO: 1156 - DNA, 17 bp, Homo sapiens
tgggacggtccccagaa

SEQ ID NO: 1157 - DNA, 17 bp, Homo sapiens
gggacggtccccagaat

SEQ ID NO: 1158 - DNA, 17 bp, Homo sapiens
ggacggtccccagaata

SEQ ID NO: 1159 - DNA, 17 bp, Homo sapiens
gacggtccccagaataa

SEQ ID NO: 1160 - DNA, 17 bp, Homo sapiens
acggtccccagaataag

SEQ ID NO: 1161 - DNA, 17 bp, Homo sapiens
cggtccccagaataaga

SEQ ID NO: 1162 - DNA, 17 bp, Homo sapiens
ggtccccagaataagaa

SEQ ID NO: 1163 - DNA, 17 bp, Homo sapiens
gtccccagaataagaag

SEQ ID NO: 1164 - DNA, 17 bp, Homo sapiens
tccccagaataagaagg

SEQ ID NO: 1165 - DNA, 17 bp, Homo sapiens
ccccagaataagaagga

SEQ ID NO: 1166 - DNA, 17 bp, Homo sapiens
cccagaataagaaggac

SEQ ID NO: 1167 - DNA, 17 bp, Homo sapiens
ccagaataagaaggaca

SEQ ID NO: 1168 - DNA, 17 bp, Homo sapiens
cagaataagaaggacaa

SEQ ID NO: 1169 - DNA, 17 bp, Homo sapiens
agaataagaaggacaaa

SEQ ID NO: 1170 - DNA, 17 bp, Homo sapiens
gaataagaaggacaaag

SEQ ID NO: 1171 - DNA, 17 bp, Homo sapiens
aataagaaggacaaaga

SEQ ID NO: 1172 - DNA, 17 bp, Homo sapiens
ataagaaggacaaagaa

SEQ ID NO: 1173 - DNA, 17 bp, Homo sapiens
taagaaggacaaagaag

SEQ ID NO: 1174 - DNA, 17 bp, Homo sapiens
aagaaggacaaagaagg

SEQ ID NO: 1175 - DNA, 17 bp, Homo sapiens
agaaggacaaagaaggg

SEQ ID NO: 1176 - DNA, 17 bp, Homo sapiens
gaaggacaaagaagggg

SEQ ID NO: 1177 - DNA, 17 bp, Homo sapiens
aaggacaaagaaggggt

SEQ ID NO: 1178 - DNA, 17 bp, Homo sapiens
aggacaaagaaggggtg

SEQ ID NO: 1179 - DNA, 17 bp, Homo sapiens
ggacaaagaaggggtgc

SEQ ID NO: 1180 - DNA, 17 bp, Homo sapiens
gacaaagaaggggtgct

SEQ ID NO: 1181 - DNA, 17 bp, Homo sapiens
acaaagaaggggtgctc

SEQ ID NO: 1182 - DNA, 17 bp, Homo sapiens
caaagaaggggtgctct

SEQ ID NO: 1183 - DNA, 17 bp, Homo sapiens
aaagaaggggtgctctt

SEQ ID NO: 1184 - DNA, 17 bp, Homo sapiens
aagaaggggtgctctta

SEQ ID NO: 1185 - DNA, 17 bp, Homo sapiens
agaaggggtgctcttaa

SEQ ID NO: 1186 - DNA, 17 bp, Homo sapiens
gaaggggtgctcttaag

SEQ ID NO: 1187 - DNA, 17 bp, Homo sapiens
aaggggtgctcttaagt

SEQ ID NO: 1188 - DNA, 17 bp, Homo sapiens
aggggtgctcttaagta

SEQ ID NO: 1189 - DNA, 17 bp, Homo sapiens
ggggtgctcttaagtaa

SEQ ID NO: 1190 - DNA, 17 bp, Homo sapiens
gggtgctcttaagtaag

SEQ ID NO: 1191 - DNA, 17 bp, Homo sapiens
ggtgctcttaagtaagg

SEQ ID NO: 1192 - DNA, 17 bp, Homo sapiens
gtgctcttaagtaaggc

SEQ ID NO: 1193 - DNA, 17 bp, Homo sapiens
tgctcttaagtaaggca

SEQ ID NO: 1194 - DNA, 17 bp, Homo sapiens
gctcttaagtaaggcag

SEQ ID NO: 1195 - DNA, 17 bp, Homo sapiens
ctcttaagtaaggcaga

SEQ ID NO: 1196 - DNA, 17 bp, Homo sapiens
tcttaagtaaggcagag

SEQ ID NO: 1197 - DNA, 17 bp, Homo sapiens
cttaagtaaggcagaga

SEQ ID NO: 1198 - DNA, 17 bp, Homo sapiens
ttaagtaaggcagagaa

SEQ ID NO: 1199 - DNA, 17 bp, Homo sapiens
taagtaaggcagagaag

SEQ ID NO: 1200 - DNA, 17 bp, Homo sapiens
aagtaaggcagagaaga

SEQ ID NO: 1201 - DNA, 17 bp, Homo sapiens
agtaaggcagagaagac

SEQ ID NO: 1202 - DNA, 17 bp, Homo sapiens
gtaaggcagagaagaca

SEQ ID NO: 1203 - DNA, 17 bp, Homo sapiens
taaggcagagaagacag

SEQ ID NO: 1204 - DNA, 17 bp, Homo sapiens
aaggcagagaagacagg

SEQ ID NO: 1205 - DNA, 17 bp, Homo sapiens
aggcagagaagacaggt

SEQ ID NO: 1206 - DNA, 17 bp, Homo sapiens
ggcagagaagacaggtg

SEQ ID NO: 1207 - DNA, 17 bp, Homo sapiens
gcagagaagacaggtga

SEQ ID NO: 1208 - DNA, 17 bp, Homo sapiens
cagagaagacaggtgag

SEQ ID NO: 1209 - DNA, 17 bp, Homo sapiens
agagaagacaggtgagc

SEQ ID NO: 1210 - DNA, 17 bp, Homo sapiens
gagaagacaggtgagcc

SEQ ID NO: 1211 - DNA, 17 bp, Homo sapiens
agaagacaggtgagcct

SEQ ID NO: 1212 - DNA, 17 bp, Homo sapiens
gaagacaggtgagcctc

SEQ ID NO: 1213 - DNA, 17 bp, Homo sapiens
aagacaggtgagcctca

SEQ ID NO: 1214 - DNA, 17 bp, Homo sapiens
agacaggtgagcctcag

SEQ ID NO: 1215 - DNA, 17 bp, Homo sapiens
gacaggtgagcctcaga

SEQ ID NO: 1216 - DNA, 17 bp, Homo sapiens
acaggtgagcctcagac

SEQ ID NO: 1217 - DNA, 17 bp, Homo sapiens
caggtgagcctcagacc

SEQ ID NO: 1218 - DNA, 17 bp, Homo sapiens
aggtgagcctcagaccc

SEQ ID NO: 1219 - DNA, 17 bp, Homo sapiens
ggtgagcctcagaccca

SEQ ID NO: 1220 - DNA, 17 bp, Homo sapiens
gtgagcctcagacccag

SEQ ID NO: 1221 - DNA, 17 bp, Homo sapiens
tgagcctcagacccaga

SEQ ID NO: 1222 - DNA, 17 bp, Homo sapiens
gagcctcagacccagat

SEQ ID NO: 1223 - DNA, 17 bp, Homo sapiens
agcctcagacccagatg

SEQ ID NO: 1224 - DNA, 17 bp, Homo sapiens
gcctcagacccagatgg

SEQ ID NO: 1225 - DNA, 17 bp, Homo sapiens
cctcagacccagatgga

SEQ ID NO: 1226 - DNA, 17 bp, Homo sapiens
ctcagacccagatggag

SEQ ID NO: 1227 - DNA, 17 bp, Homo sapiens
tcagacccagatggaga

SEQ ID NO: 1228 - DNA, 17 bp, Homo sapiens
cagacccagatggagaa

SEQ ID NO: 1229 - DNA, 17 bp, Homo sapiens
agacccagatggagaag

SEQ ID NO: 1230 - DNA, 17 bp, Homo sapiens
gacccagatggagaaga

SEQ ID NO: 1231 - DNA, 17 bp, Homo sapiens
acccagatggagaagac

SEQ ID NO: 1232 - DNA, 17 bp, Homo sapiens
cccagatggagaagaca

SEQ ID NO: 1233 - DNA, 17 bp, Homo sapiens
ccagatggagaagacaa

SEQ ID NO: 1234 - DNA, 17 bp, Homo sapiens
cagatggagaagacaag

SEQ ID NO: 1235 - DNA, 17 bp, Homo sapiens
agatggagaagacaagc

SEQ ID NO: 1236 - DNA, 17 bp, Homo sapiens
gatggagaagacaagcc

SEQ ID NO: 1237 - DNA, 17 bp, Homo sapiens
atggagaagacaagcca

SEQ ID NO: 1238 - DNA, 17 bp, Homo sapiens
tggagaagacaagccaa

SEQ ID NO: 1239 - DNA, 17 bp, Homo sapiens
ggagaagacaagccaag

SEQ ID NO: 1240 - DNA, 17 bp, Homo sapiens
gagaagacaagccaagt

SEQ ID NO: 1241 - DNA, 17 bp, Homo sapiens
agaagacaagccaagtg

SEQ ID NO: 1242 - DNA, 17 bp, Homo sapiens
gaagacaagccaagtgc

SEQ ID NO: 1243 - DNA, 17 bp, Homo sapiens
aagacaagccaagtgca

SEQ ID NO: 1244 - DNA, 17 bp, Homo sapiens
agacaagccaagtgcag

SEQ ID NO: 1245 - DNA, 17 bp, Homo sapiens
gacaagccaagtgcagg

SEQ ID NO: 1246 - DNA, 17 bp, Homo sapiens
acaagccaagtgcaggg

SEQ ID NO: 1247 - DNA, 17 bp, Homo sapiens
caagccaagtgcagggc

SEQ ID NO: 1248 - DNA, 17 bp, Homo sapiens
aagccaagtgcagggcg

SEQ ID NO: 1249 - DNA, 17 bp, Homo sapiens
agccaagtgcagggcga

SEQ ID NO: 1250 - DNA, 17 bp, Homo sapiens
gccaagtgcagggcgag

SEQ ID NO: 1251 - DNA, 17 bp, Homo sapiens
ccaagtgcagggcgagt

SEQ ID NO: 1252 - DNA, 17 bp, Homo sapiens
caagtgcagggcgagtt

SEQ ID NO: 1253 - DNA, 17 bp, Homo sapiens
aagtgcagggcgagttg

SEQ ID NO: 1254 - DNA, 17 bp, Homo sapiens
agtgcagggcgagttgg

SEQ ID NO: 1255 - DNA, 17 bp, Homo sapiens
gtgcagggcgagttggg

SEQ ID NO: 1256 - DNA, 17 bp, Homo sapiens
tgcagggcgagttgggg

SEQ ID NO: 1257 - DNA, 17 bp, Homo sapiens
gcagggcgagttggggg

SEQ ID NO: 1258 - DNA, 17 bp, Homo sapiens
cagggcgagttggggga

SEQ ID NO: 1259 - DNA, 17 bp, Homo sapiens
agggcgagttgggggac

SEQ ID NO: 1260 - DNA, 17 bp, Homo sapiens
gggcgagttgggggacg

SEQ ID NO: 1261 - DNA, 17 bp, Homo sapiens
ggcgagttgggggacga

SEQ ID NO: 1262 - DNA, 17 bp, Homo sapiens
gcgagttgggggacgat

SEQ ID NO: 1263 - DNA, 17 bp, Homo sapiens
cgagttgggggacgatc

SEQ ID NO: 1264 - DNA, 17 bp, Homo sapiens
gagttgggggacgatct

SEQ ID NO: 1265 - DNA, 17 bp, Homo sapiens
agttgggggacgatctg

SEQ ID NO: 1266 - DNA, 17 bp, Homo sapiens
gttgggggacgatctga

SEQ ID NO: 1267 - DNA, 17 bp, Homo sapiens
ttgggggacgatctgag

SEQ ID NO: 1268 - DNA, 17 bp, Homo sapiens
tgggggacgatctgaga

SEQ ID NO: 1269 - DNA, 17 bp, Homo sapiens
gggggacgatctgagaa

SEQ ID NO: 1270 - DNA, 17 bp, Homo sapiens
ggggacgatctgagaat

SEQ ID NO: 1271 - DNA, 17 bp, Homo sapiens
gggacgatctgagaatg

SEQ ID NO: 1272 - DNA, 17 bp, Homo sapiens
ggacgatctgagaatgg

SEQ ID NO: 1273 - DNA, 17 bp, Homo sapiens
gacgatctgagaatggg

SEQ ID NO: 1274 - DNA, 17 bp, Homo sapiens
acgatctgagaatgggg

SEQ ID NO: 1275 - DNA, 17 bp, Homo sapiens
cgatctgagaatggggg

SEQ ID NO: 1276 - DNA, 17 bp, Homo sapiens
gatctgagaatggggga

SEQ ID NO: 1277 - DNA, 17 bp, Homo sapiens
atctgagaatgggggag

SEQ ID NO: 1278 - DNA, 17 bp, Homo sapiens
tctgagaatgggggaga

SEQ ID NO: 1279 - DNA, 17 bp, Homo sapiens
ctgagaatgggggagaa

SEQ ID NO: 1280 - DNA, 17 bp, Homo sapiens
tgagaatgggggagaaa

SEQ ID NO: 1281 - DNA, 17 bp, Homo sapiens
gagaatgggggagaaag

SEQ ID NO: 1282 - DNA, 17 bp, Homo sapiens
agaatgggggagaaagc

SEQ ID NO: 1283 - DNA, 17 bp, Homo sapiens
gaatgggggagaaagca

SEQ ID NO: 1284 - DNA, 17 bp, Homo sapiens
aatgggggagaaagcag

SEQ ID NO: 1285 - DNA, 17 bp, Homo sapiens
atgggggagaaagcagg

SEQ ID NO: 1286 - DNA, 17 bp, Homo sapiens
tgggggagaaagcaggt

SEQ ID NO: 1287 - DNA, 17 bp, Homo sapiens
gggggagaaagcaggtg

SEQ ID NO: 1288 - DNA, 17 bp, Homo sapiens
ggggagaaagcaggtga

SEQ ID NO: 1289 - DNA, 17 bp, Homo sapiens
gggagaaagcaggtgag

SEQ ID NO: 1290 - DNA, 17 bp, Homo sapiens
ggagaaagcaggtgagc

SEQ ID NO: 1291 - DNA, 17 bp, Homo sapiens
gagaaagcaggtgagct

SEQ ID NO: 1292 - DNA, 17 bp, Homo sapiens
agaaagcaggtgagctt

SEQ ID NO: 1293 - DNA, 17 bp, Homo sapiens
gaaagcaggtgagcttc

SEQ ID NO: 1294 - DNA, 17 bp, Homo sapiens
aaagcaggtgagcttcg

SEQ ID NO: 1295 - DNA, 17 bp, Homo sapiens
aagcaggtgagcttcgg

SEQ ID NO: 1296 - DNA, 17 bp, Homo sapiens
agcaggtgagcttcgga

SEQ ID NO: 1297 - DNA, 17 bp, Homo sapiens
gcaggtgagcttcggag

SEQ ID NO: 1298 - DNA, 17 bp, Homo sapiens
caggtgagcttcggagc

SEQ ID NO: 1299 - DNA, 17 bp, Homo sapiens
aggtgagcttcggagca

SEQ ID NO: 1300 - DNA, 17 bp, Homo sapiens
ggtgagcttcggagcac

SEQ ID NO: 1301 - DNA, 17 bp, Homo sapiens
gtgagcttcggagcacg

SEQ ID NO: 1302 - DNA, 17 bp, Homo sapiens
tgagcttcggagcacga

SEQ ID NO: 1303 - DNA, 17 bp, Homo sapiens
gagcttcggagcacgac

SEQ ID NO: 1304 - DNA, 17 bp, Homo sapiens
agcttcggagcacgact

SEQ ID NO: 1305 - DNA, 17 bp, Homo sapiens
gcttcggagcacgactg

SEQ ID NO: 1306 - DNA, 17 bp, Homo sapiens
cttcggagcacgactgg

SEQ ID NO: 1307 - DNA, 17 bp, Homo sapiens
ttcggagcacgactggg

SEQ ID NO: 1308 - DNA, 17 bp, Homo sapiens
tcggagcacgactggga

SEQ ID NO: 1309 - DNA, 17 bp, Homo sapiens
cggagcacgactgggaa

SEQ ID NO: 1310 - DNA, 17 bp, Homo sapiens
ggagcacgactgggaag

SEQ ID NO: 1311 - DNA, 17 bp, Homo sapiens
gagcacgactgggaagg

SEQ ID NO: 1312 - DNA, 17 bp, Homo sapiens
agcacgactgggaaggc

SEQ ID NO: 1313 - DNA, 17 bp, Homo sapiens
gcacgactgggaaggca

SEQ ID NO: 1314 - DNA, 17 bp, Homo sapiens
cacgactgggaaggcag

SEQ ID NO: 1315 - DNA, 17 bp, Homo sapiens
acgactgggaaggcagg

SEQ ID NO: 1316 - DNA, 17 bp, Homo sapiens
cgactgggaaggcaggt

SEQ ID NO: 1317 - DNA, 17 bp, Homo sapiens
gactgggaaggcaggtg

SEQ ID NO: 1318 - DNA, 17 bp, Homo sapiens
actgggaaggcaggtga

SEQ ID NO: 1319 - DNA, 17 bp, Homo sapiens
ctgggaaggcaggtgag

SEQ ID NO: 1320 - DNA, 17 bp, Homo sapiens
tgggaaggcaggtgagt

SEQ ID NO: 1321 - DNA, 17 bp, Homo sapiens
gggaaggcaggtgagtc

SEQ ID NO: 1322 - DNA, 17 bp, Homo sapiens
ggaaggcaggtgagtcc

SEQ ID NO: 1323 - DNA, 17 bp, Homo sapiens
gaaggcaggtgagtcct

SEQ ID NO: 1324 - DNA, 17 bp, Homo sapiens
aaggcaggtgagtcctg

SEQ ID NO: 1325 - DNA, 17 bp, Homo sapiens
aggcaggtgagtcctgg

SEQ ID NO: 1326 - DNA, 17 bp, Homo sapiens
ggcaggtgagtcctggg

SEQ ID NO: 1327 - DNA, 17 bp, Homo sapiens
gcaggtgagtcctggga

SEQ ID NO: 1328 - DNA, 17 bp, Homo sapiens
caggtgagtcctgggat

SEQ ID NO: 1329 - DNA, 17 bp, Homo sapiens
aggtgagtcctgggata

SEQ ID NO: 1330 - DNA, 17 bp, Homo sapiens
ggtgagtcctgggataa

SEQ ID NO: 1331 - DNA, 17 bp, Homo sapiens
gtgagtcctgggataag

SEQ ID NO: 1332 - DNA, 17 bp, Homo sapiens
tgagtcctgggataaga

SEQ ID NO: 1333 - DNA, 17 bp, Homo sapiens
gagtcctgggataagaa

SEQ ID NO: 1334 - DNA, 17 bp, Homo sapiens
agtcctgggataagaag

SEQ ID NO: 1335 - DNA, 17 bp, Homo sapiens
gtcctgggataagaagg

SEQ ID NO: 1336 - DNA, 17 bp, Homo sapiens
tcctgggataagaagga

SEQ ID NO: 1337 - DNA, 17 bp, Homo sapiens
cctgggataagaaggaa

SEQ ID NO: 1338 - DNA, 17 bp, Homo sapiens
ctgggataagaaggaaa

SEQ ID NO: 1339 - DNA, 17 bp, Homo sapiens
tgggataagaaggaaaa

SEQ ID NO: 1340 - DNA, 17 bp, Homo sapiens
gggataagaaggaaaag

SEQ ID NO: 1341 - DNA, 17 bp, Homo sapiens
ggataagaaggaaaaga

SEQ ID NO: 1342 - DNA, 17 bp, Homo sapiens
gataagaaggaaaagat

SEQ ID NO: 1343 - DNA, 17 bp, Homo sapiens
ataagaaggaaaagatg

SEQ ID NO: 1344 - DNA, 17 bp, Homo sapiens
taagaaggaaaagatgg

SEQ ID NO: 1345 - DNA, 17 bp, Homo sapiens
aagaaggaaaagatggg

SEQ ID NO: 1346 - DNA, 17 bp, Homo sapiens
agaaggaaaagatgggg

SEQ ID NO: 1347 - DNA, 17 bp, Homo sapiens
gaaggaaaagatggggc

SEQ ID NO: 1348 - DNA, 17 bp, Homo sapiens
aaggaaaagatggggca

SEQ ID NO: 1349 - DNA, 17 bp, Homo sapiens
aggaaaagatggggcaa

SEQ ID NO: 1350 - DNA, 17 bp, Homo sapiens
ggaaaagatggggcaac

SEQ ID NO: 1351 - DNA, 17 bp, Homo sapiens
gaaaagatggggcaacc

SEQ ID NO: 1352 - DNA, 17 bp, Homo sapiens
aaaagatggggcaaccc

SEQ ID NO: 1353 - DNA, 17 bp, Homo sapiens
aaagatggggcaacccc

SEQ ID NO: 1354 - DNA, 17 bp, Homo sapiens
aagatggggcaacccca

SEQ ID NO: 1355 - DNA, 17 bp, Homo sapiens
agatggggcaaccccag

SEQ ID NO: 1356 - DNA, 17 bp, Homo sapiens
gatggggcaaccccagg

SEQ ID NO: 1357 - DNA, 17 bp, Homo sapiens
atggggcaaccccaggg

SEQ ID NO: 1358 - DNA, 17 bp, Homo sapiens
tggggcaaccccagggt

SEQ ID NO: 1359 - DNA, 17 bp, Homo sapiens
ggggcaaccccagggta

SEQ ID NO: 1360 - DNA, 17 bp, Homo sapiens
gggcaaccccagggtaa

SEQ ID NO: 1361 - DNA, 17 bp, Homo sapiens
ggcaaccccagggtaag

SEQ ID NO: 1362 - DNA, 17 bp, Homo sapiens
gcaaccccagggtaagt

SEQ ID NO: 1363 - DNA, 17 bp, Homo sapiens
caaccccagggtaagtc

SEQ ID NO: 1364 - DNA, 17 bp, Homo sapiens
aaccccagggtaagtcc

SEQ ID NO: 1365 - DNA, 17 bp, Homo sapiens
accccagggtaagtccg

SEQ ID NO: 1366 - DNA, 17 bp, Homo sapiens
ccccagggtaagtccgg

SEQ ID NO: 1367 - DNA, 17 bp, Homo sapiens
cccagggtaagtccggg

SEQ ID NO: 1368 - DNA, 17 bp, Homo sapiens
ccagggtaagtccggga

SEQ ID NO: 1369 - DNA, 17 bp, Homo sapiens
cagggtaagtccgggaa

SEQ ID NO: 1370 - DNA, 17 bp, Homo sapiens
agggtaagtccgggaac

SEQ ID NO: 1371 - DNA, 17 bp, Homo sapiens
gggtaagtccgggaacg

SEQ ID NO: 1372 - DNA, 17 bp, Homo sapiens
ggtaagtccgggaacgc

SEQ ID NO: 1373 - DNA, 17 bp, Homo sapiens
gtaagtccgggaacgca

SEQ ID NO: 1374 - DNA, 17 bp, Homo sapiens
taagtccgggaacgcag

SEQ ID NO: 1375 - DNA, 17 bp, Homo sapiens
aagtccgggaacgcagg

SEQ ID NO: 1376 - DNA, 17 bp, Homo sapiens
agtccgggaacgcaggt

SEQ ID NO: 1377 - DNA, 17 bp, Homo sapiens
gtccgggaacgcaggtg

SEQ ID NO: 1378 - DNA, 17 bp, Homo sapiens
tccgggaacgcaggtga

SEQ ID NO: 1379 - DNA, 17 bp, Homo sapiens
ccgggaacgcaggtgaa

SEQ ID NO: 1380 - DNA, 17 bp, Homo sapiens
cgggaacgcaggtgaag

SEQ ID NO: 1381 - DNA, 17 bp, Homo sapiens
gggaacgcaggtgaagc

SEQ ID NO: 1382 - DNA, 17 bp, Homo sapiens
ggaacgcaggtgaagct

SEQ ID NO: 1383 - DNA, 17 bp, Homo sapiens
gaacgcaggtgaagctc

SEQ ID NO: 1384 - DNA, 17 bp, Homo sapiens
aacgcaggtgaagctcg

SEQ ID NO: 1385 - DNA, 17 bp, Homo sapiens
acgcaggtgaagctcgg

SEQ ID NO: 1386 - DNA, 17 bp, Homo sapiens
cgcaggtgaagctcgga

SEQ ID NO: 1387 - DNA, 17 bp, Homo sapiens
gcaggtgaagctcggag

SEQ ID NO: 1388 - DNA, 17 bp, Homo sapiens
caggtgaagctcggagt

SEQ ID NO: 1389 - DNA, 17 bp, Homo sapiens
aggtgaagctcggagtc

SEQ ID NO: 1390 - DNA, 17 bp, Homo sapiens
ggtgaagctcggagtca

SEQ ID NO: 1391 - DNA, 17 bp, Homo sapiens
gtgaagctcggagtcag

SEQ ID NO: 1392 - DNA, 17 bp, Homo sapiens
tgaagctcggagtcaga

SEQ ID NO: 1393 - DNA, 17 bp, Homo sapiens
gaagctcggagtcagac

SEQ ID NO: 1394 - DNA, 17 bp, Homo sapiens
aagctcggagtcagaca

SEQ ID NO: 1395 - DNA, 17 bp, Homo sapiens
agctcggagtcagacag

SEQ ID NO: 1396 - DNA, 17 bp, Homo sapiens
gctcggagtcagacaga

SEQ ID NO: 1397 - DNA, 17 bp, Homo sapiens
ctcggagtcagacagag

SEQ ID NO: 1398 - DNA, 17 bp, Homo sapiens
tcggagtcagacagaga

SEQ ID NO: 1399 - DNA, 17 bp, Homo sapiens
cggagtcagacagagaa

SEQ ID NO: 1400 - DNA, 17 bp, Homo sapiens
ggagtcagacagagaag

SEQ ID NO: 1401 - DNA, 17 bp, Homo sapiens
gagtcagacagagaagg

SEQ ID NO: 1402 - DNA, 17 bp, Homo sapiens
agtcagacagagaaggg

SEQ ID NO: 1403 - DNA, 17 bp, Homo sapiens
gtcagacagagaagggc

SEQ ID NO: 1404 - DNA, 17 bp, Homo sapiens
tcagacagagaagggct

SEQ ID NO: 1405 - DNA, 17 bp, Homo sapiens
cagacagagaagggctg

SEQ ID NO: 1406 - DNA, 17 bp, Homo sapiens
agacagagaagggctgt

SEQ ID NO: 1407 - DNA, 17 bp, Homo sapiens
gacagagaagggctgtg

SEQ ID NO: 1408 - DNA, 17 bp, Homo sapiens
acagagaagggctgtga

SEQ ID NO: 1409 - DNA, 17 bp, Homo sapiens
cagagaagggctgtgaa

SEQ ID NO: 1410 - DNA, 17 bp, Homo sapiens
agagaagggctgtgaag

SEQ ID NO: 1411 - DNA, 17 bp, Homo sapiens
gagaagggctgtgaagc

SEQ ID NO: 1412 - DNA, 17 bp, Homo sapiens
agaagggctgtgaagcc

SEQ ID NO: 1413 - DNA, 17 bp, Homo sapiens
gaagggctgtgaagccc

SEQ ID NO: 1414 - DNA, 17 bp, Homo sapiens
aagggctgtgaagcccc

SEQ ID NO: 1415 - DNA, 17 bp, Homo sapiens
agggctgtgaagcccca

SEQ ID NO: 1416 - DNA, 17 bp, Homo sapiens
gggctgtgaagccccaa

SEQ ID NO: 1417 - DNA, 17 bp, Homo sapiens
ggctgtgaagccccaaa

SEQ ID NO: 1418 - DNA, 17 bp, Homo sapiens
gctgtgaagccccaaag

SEQ ID NO: 1419 - DNA, 17 bp, Homo sapiens
ctgtgaagccccaaagg

SEQ ID NO: 1420 - DNA, 17 bp, Homo sapiens
tgtgaagccccaaagga

SEQ ID NO: 1421 - DNA, 17 bp, Homo sapiens
gtgaagccccaaaggag

SEQ ID NO: 1422 - DNA, 17 bp, Homo sapiens
tgaagccccaaaggagg

SEQ ID NO: 1423 - DNA, 17 bp, Homo sapiens
gaagccccaaaggaggt

SEQ ID NO: 1424 - DNA, 17 bp, Homo sapiens
aagccccaaaggaggtg

SEQ ID NO: 1425 - DNA, 17 bp, Homo sapiens
agccccaaaggaggtga

SEQ ID NO: 1426 - DNA, 17 bp, Homo sapiens
gccccaaaggaggtgag

SEQ ID NO: 1427 - DNA, 17 bp, Homo sapiens
ccccaaaggaggtgagc

SEQ ID NO: 1428 - DNA, 17 bp, Homo sapiens
cccaaaggaggtgagca

SEQ ID NO: 1429 - DNA, 17 bp, Homo sapiens
ccaaaggaggtgagcac

SEQ ID NO: 1430 - DNA, 17 bp, Homo sapiens
caaaggaggtgagcaca

SEQ ID NO: 1431 - DNA, 17 bp, Homo sapiens
aaaggaggtgagcacaa

SEQ ID NO: 1432 - DNA, 17 bp, Homo sapiens
aaggaggtgagcacaat

SEQ ID NO: 1433 - DNA, 17 bp, Homo sapiens
aggaggtgagcacaatg

SEQ ID NO: 1434 - DNA, 17 bp, Homo sapiens
ggaggtgagcacaatgg

SEQ ID NO: 1435 - DNA, 17 bp, Homo sapiens
gaggtgagcacaatggt

SEQ ID NO: 1436 - DNA, 17 bp, Homo sapiens
aggtgagcacaatggtg

SEQ ID NO: 1437 - DNA, 17 bp, Homo sapiens
ggtgagcacaatggtgg

SEQ ID NO: 1438 - DNA, 17 bp, Homo sapiens
gtgagcacaatggtgga

SEQ ID NO: 1439 - DNA, 17 bp, Homo sapiens
tgagcacaatggtggag

SEQ ID NO: 1440 - DNA, 17 bp, Homo sapiens
gagcacaatggtggagt

SEQ ID NO: 1441 - DNA, 17 bp, Homo sapiens
agcacaatggtggagtc

SEQ ID NO: 1442 - DNA, 17 bp, Homo sapiens
gcacaatggtggagtcg

SEQ ID NO: 1443 - DNA, 17 bp, Homo sapiens
cacaatggtggagtcgc

SEQ ID NO: 1444 - DNA, 17 bp, Homo sapiens
acaatggtggagtcgcc

SEQ ID NO: 1445 - DNA, 17 bp, Homo sapiens
caatggtggagtcgcca

SEQ ID NO: 1446 - DNA, 17 bp, Homo sapiens
aatggtggagtcgccag

SEQ ID NO: 1447 - DNA, 17 bp, Homo sapiens
atggtggagtcgccagc

SEQ ID NO: 1448 - DNA, 17 bp, Homo sapiens
tggtggagtcgccagca

SEQ ID NO: 1449 - DNA, 17 bp, Homo sapiens
ggtggagtcgccagcag

SEQ ID NO: 1450 - DNA, 17 bp, Homo sapiens
gtggagtcgccagcagc

SEQ ID NO: 1451 - DNA, 17 bp, Homo sapiens
tggagtcgccagcagct

SEQ ID NO: 1452 - DNA, 17 bp, Homo sapiens
ggagtcgccagcagctc

SEQ ID NO: 1453 - DNA, 17 bp, Homo sapiens
gagtcgccagcagctcc

SEQ ID NO: 1454 - DNA, 17 bp, Homo sapiens
agtcgccagcagctcct

SEQ ID NO: 1455 - DNA, 17 bp, Homo sapiens
gtcgccagcagctcctg

SEQ ID NO: 1456 - DNA, 17 bp, Homo sapiens
tcgccagcagctcctgg

SEQ ID NO: 1457 - DNA, 17 bp, Homo sapiens
cgccagcagctcctggg

SEQ ID NO: 1458 - DNA, 17 bp, Homo sapiens
gccagcagctcctggga

SEQ ID NO: 1459 - DNA, 17 bp, Homo sapiens
ccagcagctcctgggaa

SEQ ID NO: 1460 - DNA, 17 bp, Homo sapiens
cagcagctcctgggaag

SEQ ID NO: 1461 - DNA, 17 bp, Homo sapiens
agcagctcctgggaagg

SEQ ID NO: 1462 - DNA, 17 bp, Homo sapiens
gcagctcctgggaaggg

SEQ ID NO: 1463 - DNA, 17 bp, Homo sapiens
cagctcctgggaaggga

SEQ ID NO: 1464 - DNA, 17 bp, Homo sapiens
agctcctgggaagggag

SEQ ID NO: 1465 - DNA, 17 bp, Homo sapiens
gctcctgggaagggagg

SEQ ID NO: 1466 - DNA, 17 bp, Homo sapiens
ctcctgggaagggaggc

SEQ ID NO: 1467 - DNA, 17 bp, Homo sapiens
tcctgggaagggaggct

SEQ ID NO: 1468 - DNA, 17 bp, Homo sapiens
cctgggaagggaggctg

SEQ ID NO: 1469 - DNA, 17 bp, Homo sapiens
ctgggaagggaggctgg

SEQ ID NO: 1470 - DNA, 17 bp, Homo sapiens
tgggaagggaggctggc

SEQ ID NO: 1471 - DNA, 17 bp, Homo sapiens
gggaagggaggctggcc

SEQ ID NO: 1472 - DNA, 17 bp, Homo sapiens
ggaagggaggctggcca

SEQ ID NO: 1473 - DNA, 17 bp, Homo sapiens
gaagggaggctggccag

SEQ ID NO: 1474 - DNA, 17 bp, Homo sapiens
aagggaggctggccagg

SEQ ID NO: 1475 - DNA, 17 bp, Homo sapiens
agggaggctggccagga

SEQ ID NO: 1476 - DNA, 17 bp, Homo sapiens
gggaggctggccaggaa

SEQ ID NO: 1477 - DNA, 17 bp, Homo sapiens
ggaggctggccaggaag

SEQ ID NO: 1478 - DNA, 17 bp, Homo sapiens
gaggctggccaggaagc

SEQ ID NO: 1479 - DNA, 17 bp, Homo sapiens
aggctggccaggaagcc

SEQ ID NO: 1480 - DNA, 17 bp, Homo sapiens
ggctggccaggaagccg

SEQ ID NO: 1481 - DNA, 17 bp, Homo sapiens
gctggccaggaagccgt

SEQ ID NO: 1482 - DNA, 17 bp, Homo sapiens
ctggccaggaagccgtg

SEQ ID NO: 1483 - DNA, 17 bp, Homo sapiens
tggccaggaagccgtgg

SEQ ID NO: 1484 - DNA, 17 bp, Homo sapiens
ggccaggaagccgtggg

SEQ ID NO: 1485 - DNA, 17 bp, Homo sapiens
gccaggaagccgtgggc

SEQ ID NO: 1486 - DNA, 17 bp, Homo sapiens
ccaggaagccgtgggca

SEQ ID NO: 1487 - DNA, 17 bp, Homo sapiens
caggaagccgtgggcag

SEQ ID NO: 1488 - DNA, 17 bp, Homo sapiens
aggaagccgtgggcagg

SEQ ID NO: 1489 - DNA, 17 bp, Homo sapiens
ggaagccgtgggcagga

SEQ ID NO: 1490 - DNA, 17 bp, Homo sapiens
gaagccgtgggcaggaa

SEQ ID NO: 1491 - DNA, 17 bp, Homo sapiens
aagccgtgggcaggaag

SEQ ID NO: 1492 - DNA, 17 bp, Homo sapiens
agccgtgggcaggaagc

SEQ ID NO: 1493 - DNA, 17 bp, Homo sapiens
gccgtgggcaggaagca

SEQ ID NO: 1494 - DNA, 17 bp, Homo sapiens
ccgtgggcaggaagcag

SEQ ID NO: 1495 - DNA, 17 bp, Homo sapiens
cgtgggcaggaagcaga

SEQ ID NO: 1496 - DNA, 17 bp, Homo sapiens
gtgggcaggaagcagag

SEQ ID NO: 1497 - DNA, 17 bp, Homo sapiens
tgggcaggaagcagagg

SEQ ID NO: 1498 - DNA, 17 bp, Homo sapiens
gggcaggaagcagagga

SEQ ID NO: 1499 - DNA, 17 bp, Homo sapiens
ggcaggaagcagaggag

SEQ ID NO: 1500 - DNA, 17 bp, Homo sapiens
gcaggaagcagaggagc

SEQ ID NO: 1501 - DNA, 17 bp, Homo sapiens
caggaagcagaggagcc

SEQ ID NO: 1502 - DNA, 17 bp, Homo sapiens
aggaagcagaggagccc

SEQ ID NO: 1503 - DNA, 17 bp, Homo sapiens
ggaagcagaggagccct

SEQ ID NO: 1504 - DNA, 17 bp, Homo sapiens
gaagcagaggagccctg

SEQ ID NO: 1505 - DNA, 17 bp, Homo sapiens
aagcagaggagccctgc

SEQ ID NO: 1506 - DNA, 17 bp, Homo sapiens
agcagaggagccctgct

SEQ ID NO: 1507 - DNA, 17 bp, Homo sapiens
gcagaggagccctgctc

SEQ ID NO: 1508 - DNA, 17 bp, Homo sapiens
cagaggagccctgctca

SEQ ID NO: 1509 - DNA, 17 bp, Homo sapiens
agaggagccctgctcaa

SEQ ID NO: 1510 - DNA, 17 bp, Homo sapiens
gaggagccctgctcaag

SEQ ID NO: 1511 - DNA, 17 bp, Homo sapiens
aggagccctgctcaaga

SEQ ID NO: 1512 - DNA, 17 bp, Homo sapiens
ggagccctgctcaagag

SEQ ID NO: 1513 - DNA, 17 bp, Homo sapiens
gagccctgctcaagagc

SEQ ID NO: 1514 - DNA, 17 bp, Homo sapiens
agccctgctcaagagca

SEQ ID NO: 1515 - DNA, 17 bp, Homo sapiens
gccctgctcaagagcag

SEQ ID NO: 1516 - DNA, 17 bp, Homo sapiens
ccctgctcaagagcagg

SEQ ID NO: 1517 - DNA, 17 bp, Homo sapiens
cctgctcaagagcaggt

SEQ ID NO: 1518 - DNA, 17 bp, Homo sapiens
ctgctcaagagcaggtg

SEQ ID NO: 1519 - DNA, 17 bp, Homo sapiens
tgctcaagagcaggtga

SEQ ID NO: 1520 - DNA, 17 bp, Homo sapiens
gctcaagagcaggtgat

SEQ ID NO: 1521 - DNA, 17 bp, Homo sapiens
ctcaagagcaggtgatg

SEQ ID NO: 1522 - DNA, 17 bp, Homo sapiens
tcaagagcaggtgatgg

SEQ ID NO: 1523 - DNA, 17 bp, Homo sapiens
caagagcaggtgatggg

SEQ ID NO: 1524 - DNA, 17 bp, Homo sapiens
aagagcaggtgatgggg

SEQ ID NO: 1525 - DNA, 17 bp, Homo sapiens
agagcaggtgatggggc

SEQ ID NO: 1526 - DNA, 17 bp, Homo sapiens
gagcaggtgatggggct

SEQ ID NO: 1527 - DNA, 17 bp, Homo sapiens
agcaggtgatggggctg

SEQ ID NO: 1528 - DNA, 17 bp, Homo sapiens
gcaggtgatggggctgg

SEQ ID NO: 1529 - DNA, 17 bp, Homo sapiens
caggtgatggggctggt

SEQ ID NO: 1530 - DNA, 17 bp, Homo sapiens
aggtgatggggctggtg

SEQ ID NO: 1531 - DNA, 17 bp, Homo sapiens
ggtgatggggctggtgc

SEQ ID NO: 1532 - DNA, 17 bp, Homo sapiens
gtgatggggctggtgcc

SEQ ID NO: 1533 - DNA, 17 bp, Homo sapiens
tgatggggctggtgccc

SEQ ID NO: 1534 - DNA, 17 bp, Homo sapiens
gatggggctggtgccct

SEQ ID NO: 1535 - DNA, 17 bp, Homo sapiens
atggggctggtgccctg

SEQ ID NO: 1536 - DNA, 17 bp, Homo sapiens
tggggctggtgccctgg

SEQ ID NO: 1537 - DNA, 17 bp, Homo sapiens
ggggctggtgccctgga

SEQ ID NO: 1538 - DNA, 17 bp, Homo sapiens
gggctggtgccctggag

SEQ ID NO: 1539 - DNA, 17 bp, Homo sapiens
ggctggtgccctggaga

SEQ ID NO: 1540 - DNA, 17 bp, Homo sapiens
gctggtgccctggagac

SEQ ID NO: 1541 - DNA, 17 bp, Homo sapiens
ctggtgccctggagaca

SEQ ID NO: 1542 - DNA, 17 bp, Homo sapiens
tggtgccctggagacag

SEQ ID NO: 1543 - DNA, 17 bp, Homo sapiens
ggtgccctggagacaga

SEQ ID NO: 1544 - DNA, 17 bp, Homo sapiens
gtgccctggagacagag

SEQ ID NO: 1545 - DNA, 17 bp, Homo sapiens
tgccctggagacagagc

SEQ ID NO: 1546 - DNA, 17 bp, Homo sapiens
gccctggagacagagct

SEQ ID NO: 1547 - DNA, 17 bp, Homo sapiens
ccctggagacagagctg

SEQ ID NO: 1548 - DNA, 17 bp, Homo sapiens
cctggagacagagctgg

SEQ ID NO: 1549 - DNA, 17 bp, Homo sapiens
ctggagacagagctgga

SEQ ID NO: 1550 - DNA, 17 bp, Homo sapiens
tggagacagagctggaa

SEQ ID NO: 1551 - DNA, 17 bp, Homo sapiens
ggagacagagctggaag

SEQ ID NO: 1552 - DNA, 17 bp, Homo sapiens
gagacagagctggaagg

SEQ ID NO: 1553 - DNA, 17 bp, Homo sapiens
agacagagctggaagga

SEQ ID NO: 1554 - DNA, 17 bp, Homo sapiens
gacagagctggaaggac

SEQ ID NO: 1555 - DNA, 17 bp, Homo sapiens
acagagctggaaggacc

SEQ ID NO: 1556 - DNA, 17 bp, Homo sapiens
cagagctggaaggaccc

SEQ ID NO: 1557 - DNA, 17 bp, Homo sapiens
agagctggaaggaccca

SEQ ID NO: 1558 - DNA, 17 bp, Homo sapiens
gagctggaaggacccag

SEQ ID NO: 1559 - DNA, 17 bp, Homo sapiens
agctggaaggacccagc

SEQ ID NO: 1560 - DNA, 17 bp, Homo sapiens
gctggaaggacccagcc

SEQ ID NO: 1561 - DNA, 17 bp, Homo sapiens
ctggaaggacccagcca

SEQ ID NO: 1562 - DNA, 17 bp, Homo sapiens
tggaaggacccagccag

SEQ ID NO: 1563 - DNA, 17 bp, Homo sapiens
ggaaggacccagccagc

SEQ ID NO: 1564 - DNA, 17 bp, Homo sapiens
gaaggacccagccagcc

SEQ ID NO: 1565 - DNA, 17 bp, Homo sapiens
aaggacccagccagcct

SEQ ID NO: 1566 - DNA, 17 bp, Homo sapiens
aggacccagccagcctg

SEQ ID NO: 1567 - DNA, 17 bp, Homo sapiens
ggacccagccagcctgc

SEQ ID NO: 1568 - DNA, 17 bp, Homo sapiens
gacccagccagcctgct

SEQ ID NO: 1569 - DNA, 17 bp, Homo sapiens
acccagccagcctgctc

SEQ ID NO: 1570 - DNA, 17 bp, Homo sapiens
cccagccagcctgctct

SEQ ID NO: 1571 - DNA, 17 bp, Homo sapiens
ccagccagcctgctctg

SEQ ID NO: 1572 - DNA, 17 bp, Homo sapiens
cagccagcctgctctgg

SEQ ID NO: 1573 - DNA, 17 bp, Homo sapiens
agccagcctgctctgga

SEQ ID NO: 1574 - DNA, 17 bp, Homo sapiens
gccagcctgctctggag

SEQ ID NO: 1575 - DNA, 17 bp, Homo sapiens
ccagcctgctctggaga

SEQ ID NO: 1576 - DNA, 17 bp, Homo sapiens
cagcctgctctggagaa

SEQ ID NO: 1577 - DNA, 17 bp, Homo sapiens
agcctgctctggagaag

SEQ ID NO: 1578 - DNA, 17 bp, Homo sapiens
gcctgctctggagaagg

SEQ ID NO: 1579 - DNA, 17 bp, Homo sapiens
cctgctctggagaagga

SEQ ID NO: 1580 - DNA, 17 bp, Homo sapiens
ctgctctggagaaggat

SEQ ID NO: 1581 - DNA, 17 bp, Homo sapiens
tgctctggagaaggatg

SEQ ID NO: 1582 - DNA, 17 bp, Homo sapiens
gctctggagaaggatgc

SEQ ID NO: 1583 - DNA, 17 bp, Homo sapiens
ctctggagaaggatgca

SEQ ID NO: 1584 - DNA, 17 bp, Homo sapiens
tctggagaaggatgcag

SEQ ID NO: 1585 - DNA, 17 bp, Homo sapiens
ctggagaaggatgcaga

SEQ ID NO: 1586 - DNA, 17 bp, Homo sapiens
tggagaaggatgcagaa

SEQ ID NO: 1587 - DNA, 17 bp, Homo sapiens
ggagaaggatgcagaaa

SEQ ID NO: 1588 - DNA, 17 bp, Homo sapiens
gagaaggatgcagaaag

SEQ ID NO: 1589 - DNA, 17 bp, Homo sapiens
agaaggatgcagaaagg

SEQ ID NO: 1590 - DNA, 17 bp, Homo sapiens
gaaggatgcagaaaggc

SEQ ID NO: 1591 - DNA, 17 bp, Homo sapiens
aaggatgcagaaaggcc

SEQ ID NO: 1592 - DNA, 17 bp, Homo sapiens
aggatgcagaaaggcct

SEQ ID NO: 1593 - DNA, 17 bp, Homo sapiens
ggatgcagaaaggcctc

SEQ ID NO: 1594 - DNA, 17 bp, Homo sapiens
gatgcagaaaggcctcg

SEQ ID NO: 1595 - DNA, 17 bp, Homo sapiens
atgcagaaaggcctcgg

SEQ ID NO: 1596 - DNA, 17 bp, Homo sapiens
tgcagaaaggcctcgga

SEQ ID NO: 1597 - DNA, 17 bp, Homo sapiens
gcagaaaggcctcggat

SEQ ID NO: 1598 - DNA, 17 bp, Homo sapiens
cagaaaggcctcggata

SEQ ID NO: 1599 - DNA, 17 bp, Homo sapiens
agaaaggcctcggatac

SEQ ID NO: 1600 - DNA, 17 bp, Homo sapiens
gaaaggcctcggatacg

SEQ ID NO: 1601 - DNA, 17 bp, Homo sapiens
aaaggcctcggatacgg

SEQ ID NO: 1602 - DNA, 17 bp, Homo sapiens
aaggcctcggatacgga

SEQ ID NO: 1603 - DNA, 17 bp, Homo sapiens
aggcctcggatacggaa

SEQ ID NO: 1604 - DNA, 17 bp, Homo sapiens
ggcctcggatacggaag

SEQ ID NO: 1605 - DNA, 17 bp, Homo sapiens
gcctcggatacggaagg

SEQ ID NO: 1606 - DNA, 17 bp, Homo sapiens
cctcggatacggaagga

SEQ ID NO: 1607 - DNA, 17 bp, Homo sapiens
ctcggatacggaaggag

SEQ ID NO: 1608 - DNA, 17 bp, Homo sapiens
tcggatacggaaggaga

SEQ ID NO: 1609 - DNA, 17 bp, Homo sapiens
cggatacggaaggagaa

SEQ ID NO: 1610 - DNA, 17 bp, Homo sapiens
ggatacggaaggagaac

SEQ ID NO: 1611 - DNA, 17 bp, Homo sapiens
gatacggaaggagaacc

SEQ ID NO: 1612 - DNA, 17 bp, Homo sapiens
atacggaaggagaacca

SEQ ID NO: 1613 - DNA, 17 bp, Homo sapiens
tacggaaggagaaccaa

SEQ ID NO: 1614 - DNA, 17 bp, Homo sapiens
acggaaggagaaccaag

SEQ ID NO: 1615 - DNA, 17 bp, Homo sapiens
cggaaggagaaccaaga

SEQ ID NO: 1616 - DNA, 17 bp, Homo sapiens
ggaaggagaaccaagac

SEQ ID NO: 1617 - DNA, 17 bp, Homo sapiens
gaaggagaaccaagacg

SEQ ID NO: 1618 - DNA, 17 bp, Homo sapiens
aaggagaaccaagacgg

SEQ ID NO: 1619 - DNA, 17 bp, Homo sapiens
aggagaaccaagacggg

SEQ ID NO: 1620 - DNA, 17 bp, Homo sapiens
ggagaaccaagacgggc

SEQ ID NO: 1621 - DNA, 17 bp, Homo sapiens
gagaaccaagacgggcc

SEQ ID NO: 1622 - DNA, 17 bp, Homo sapiens
agaaccaagacgggcca

SEQ ID NO: 1623 - DNA, 17 bp, Homo sapiens
gaaccaagacgggccag

SEQ ID NO: 1624 - DNA, 17 bp, Homo sapiens
aaccaagacgggccagc

SEQ ID NO: 1625 - DNA, 17 bp, Homo sapiens
accaagacgggccagcc

SEQ ID NO: 1626 - DNA, 17 bp, Homo sapiens
ccaagacgggccagccc

SEQ ID NO: 1627 - DNA, 17 bp, Homo sapiens
caagacgggccagcccc

SEQ ID NO: 1628 - DNA, 17 bp, Homo sapiens
aagacgggccagccccg

SEQ ID NO: 1629 - DNA, 17 bp, Homo sapiens
agacgggccagccccgc

SEQ ID NO: 1630 - DNA, 17 bp, Homo sapiens
gacgggccagccccgca

SEQ ID NO: 1631 - DNA, 17 bp, Homo sapiens
acgggccagccccgcag

SEQ ID NO: 1632 - DNA, 17 bp, Homo sapiens
cgggccagccccgcagg

SEQ ID NO: 1633 - DNA, 17 bp, Homo sapiens
gggccagccccgcagga

SEQ ID NO: 1634 - DNA, 17 bp, Homo sapiens
ggccagccccgcaggag

SEQ ID NO: 1635 - DNA, 17 bp, Homo sapiens
gccagccccgcaggagg

SEQ ID NO: 1636 - DNA, 17 bp, Homo sapiens
ccagccccgcaggagga

SEQ ID NO: 1637 - DNA, 17 bp, Homo sapiens
cagccccgcaggaggag

SEQ ID NO: 1638 - DNA, 17 bp, Homo sapiens
agccccgcaggaggagg

SEQ ID NO: 1639 - DNA, 17 bp, Homo sapiens
gccccgcaggaggaggg

SEQ ID NO: 1640 - DNA, 17 bp, Homo sapiens
ccccgcaggaggagggc

SEQ ID NO: 1641 - DNA, 17 bp, Homo sapiens
cccgcaggaggagggca

SEQ ID NO: 1642 - DNA, 17 bp, Homo sapiens
ccgcaggaggagggcaa

SEQ ID NO: 1643 - DNA, 17 bp, Homo sapiens
cgcaggaggagggcaaa

SEQ ID NO: 1644 - DNA, 17 bp, Homo sapiens
gcaggaggagggcaaag

SEQ ID NO: 1645 - DNA, 17 bp, Homo sapiens
caggaggagggcaaagg

SEQ ID NO: 1646 - DNA, 17 bp, Homo sapiens
aggaggagggcaaagga

SEQ ID NO: 1647 - DNA, 17 bp, Homo sapiens
ggaggagggcaaaggag

SEQ ID NO: 1648 - DNA, 17 bp, Homo sapiens
gaggagggcaaaggagg

SEQ ID NO: 1649 - DNA, 17 bp, Homo sapiens
aggagggcaaaggaggc

SEQ ID NO: 1650 - DNA, 17 bp, Homo sapiens
ggagggcaaaggaggcc

SEQ ID NO: 1651 - DNA, 17 bp, Homo sapiens
gagggcaaaggaggcca

SEQ ID NO: 1652 - DNA, 17 bp, Homo sapiens
agggcaaaggaggccag

SEQ ID NO: 1653 - DNA, 17 bp, Homo sapiens
gggcaaaggaggccaga

SEQ ID NO: 1654 - DNA, 17 bp, Homo sapiens
ggcaaaggaggccagag

SEQ ID NO: 1655 - DNA, 17 bp, Homo sapiens
gcaaaggaggccagagc

SEQ ID NO: 1656 - DNA, 17 bp, Homo sapiens
caaaggaggccagagca

SEQ ID NO: 1657 - DNA, 17 bp, Homo sapiens
aaaggaggccagagcag

SEQ ID NO: 1658 - DNA, 17 bp, Homo sapiens
aaggaggccagagcaga

SEQ ID NO: 1659 - DNA, 17 bp, Homo sapiens
aggaggccagagcagag

SEQ ID NO: 1660 - DNA, 17 bp, Homo sapiens
ggaggccagagcagaga

SEQ ID NO: 1661 - DNA, 17 bp, Homo sapiens
gaggccagagcagagac

SEQ ID NO: 1662 - DNA, 17 bp, Homo sapiens
aggccagagcagagact

SEQ ID NO: 1663 - DNA, 17 bp, Homo sapiens
ggccagagcagagactc

SEQ ID NO: 1664 - DNA, 17 bp, Homo sapiens
gccagagcagagactca

SEQ ID NO: 1665 - DNA, 17 bp, Homo sapiens
ccagagcagagactcag

SEQ ID NO: 1666 - DNA, 17 bp, Homo sapiens
cagagcagagactcaga

SEQ ID NO: 1667 - DNA, 17 bp, Homo sapiens
agagcagagactcagac

SEQ ID NO: 1668 - DNA, 17 bp, Homo sapiens
gagcagagactcagacc

SEQ ID NO: 1669 - DNA, 17 bp, Homo sapiens
agcagagactcagacca

SEQ ID NO: 1670 - DNA, 17 bp, Homo sapiens
gcagagactcagaccag

SEQ ID NO: 1671 - DNA, 17 bp, Homo sapiens
cagagactcagaccagg

SEQ ID NO: 1672 - DNA, 17 bp, Homo sapiens
agagactcagaccaggc

SEQ ID NO: 1673 - DNA, 17 bp, Homo sapiens
gagactcagaccaggct

SEQ ID NO: 1674 - DNA, 17 bp, Homo sapiens
agactcagaccaggctc

SEQ ID NO: 1675 - DNA, 17 bp, Homo sapiens
gactcagaccaggctcc

SEQ ID NO: 1676 - DNA, 17 bp, Homo sapiens
actcagaccaggctcct

SEQ ID NO: 1677 - DNA, 17 bp, Homo sapiens
ctcagaccaggctcctg

SEQ ID NO: 1678 - DNA, 17 bp, Homo sapiens
tcagaccaggctcctga

SEQ ID NO: 1679 - DNA, 17 bp, Homo sapiens
cagaccaggctcctgag

SEQ ID NO: 1680 - DNA, 17 bp, Homo sapiens
agaccaggctcctgagg

SEQ ID NO: 1681 - DNA, 17 bp, Homo sapiens
gaccaggctcctgagga

SEQ ID NO: 1682 - DNA, 17 bp, Homo sapiens
accaggctcctgaggac

SEQ ID NO: 1683 - DNA, 17 bp, Homo sapiens
ccaggctcctgaggaca

SEQ ID NO: 1684 - DNA, 17 bp, Homo sapiens
caggctcctgaggacag

SEQ ID NO: 1685 - DNA, 17 bp, Homo sapiens
aggctcctgaggacaga

SEQ ID NO: 1686 - DNA, 17 bp, Homo sapiens
ggctcctgaggacagat

SEQ ID NO: 1687 - DNA, 17 bp, Homo sapiens
gctcctgaggacagatg

SEQ ID NO: 1688 - DNA, 17 bp, Homo sapiens
ctcctgaggacagatgg

SEQ ID NO: 1689 - DNA, 17 bp, Homo sapiens
tcctgaggacagatggt

SEQ ID NO: 1690 - DNA, 17 bp, Homo sapiens
cctgaggacagatggta

SEQ ID NO: 1691 - DNA, 17 bp, Homo sapiens
ctgaggacagatggtat

SEQ ID NO: 1692 - DNA, 17 bp, Homo sapiens
tgaggacagatggtatg

SEQ ID NO: 1693 - DNA, 17 bp, Homo sapiens
gaggacagatggtatga

SEQ ID NO: 1694 - DNA, 17 bp, Homo sapiens
aggacagatggtatgag

SEQ ID NO: 1695 - DNA, 17 bp, Homo sapiens
ggacagatggtatgagg

SEQ ID NO: 1696 - DNA, 17 bp, Homo sapiens
gacagatggtatgaggc

SEQ ID NO: 1697 - DNA, 17 bp, Homo sapiens
acagatggtatgaggca

SEQ ID NO: 1698 - DNA, 17 bp, Homo sapiens
cagatggtatgaggcag

SEQ ID NO: 1699 - DNA, 17 bp, Homo sapiens
agatggtatgaggcaga

SEQ ID NO: 1700 - DNA, 17 bp, Homo sapiens
gatggtatgaggcagag

SEQ ID NO: 1701 - DNA, 17 bp, Homo sapiens
atggtatgaggcagaga

SEQ ID NO: 1702 - DNA, 17 bp, Homo sapiens
tggtatgaggcagagaa

SEQ ID NO: 1703 - DNA, 17 bp, Homo sapiens
ggtatgaggcagagaaa

SEQ ID NO: 1704 - DNA, 17 bp, Homo sapiens
gtatgaggcagagaaag

SEQ ID NO: 1705 - DNA, 17 bp, Homo sapiens
tatgaggcagagaaagt

SEQ ID NO: 1706 - DNA, 17 bp, Homo sapiens
atgaggcagagaaagtc

SEQ ID NO: 1707 - DNA, 17 bp, Homo sapiens
tgaggcagagaaagtct

SEQ ID NO: 1708 - DNA, 17 bp, Homo sapiens
gaggcagagaaagtctg

SEQ ID NO: 1709 - DNA, 17 bp, Homo sapiens
aggcagagaaagtctgg

SEQ ID NO: 1710 - DNA, 17 bp, Homo sapiens
ggcagagaaagtctggc

SEQ ID NO: 1711 - DNA, 17 bp, Homo sapiens
gcagagaaagtctggct

SEQ ID NO: 1712 - DNA, 17 bp, Homo sapiens
cagagaaagtctggctg

SEQ ID NO: 1713 - DNA, 17 bp, Homo sapiens
agagaaagtctggctgg

SEQ ID NO: 1714 - DNA, 17 bp, Homo sapiens
gagaaagtctggctggc

SEQ ID NO: 1715 - DNA, 17 bp, Homo sapiens
agaaagtctggctggct

SEQ ID NO: 1716 - DNA, 17 bp, Homo sapiens
gaaagtctggctggctc

SEQ ID NO: 1717 - DNA, 17 bp, Homo sapiens
aaagtctggctggctca

SEQ ID NO: 1718 - DNA, 17 bp, Homo sapiens
aagtctggctggctcag

SEQ ID NO: 1719 - DNA, 17 bp, Homo sapiens
agtctggctggctcaga

SEQ ID NO: 1720 - DNA, 17 bp, Homo sapiens
gtctggctggctcagaa

SEQ ID NO: 1721 - DNA, 17 bp, Homo sapiens
tctggctggctcagaag

SEQ ID NO: 1722 - DNA, 17 bp, Homo sapiens
ctggctggctcagaagg

SEQ ID NO: 1723 - DNA, 17 bp, Homo sapiens
tggctggctcagaagga

SEQ ID NO: 1724 - DNA, 17 bp, Homo sapiens
ggctggctcagaaggat

SEQ ID NO: 1725 - DNA, 17 bp, Homo sapiens
gctggctcagaaggatg

SEQ ID NO: 1726 - DNA, 17 bp, Homo sapiens
ctggctcagaaggatgg

SEQ ID NO: 1727 - DNA, 17 bp, Homo sapiens
tggctcagaaggatgga

SEQ ID NO: 1728 - DNA, 17 bp, Homo sapiens
ggctcagaaggatggat

SEQ ID NO: 1729 - DNA, 17 bp, Homo sapiens
gctcagaaggatggatt

SEQ ID NO: 1730 - DNA, 17 bp, Homo sapiens
ctcagaaggatggattt

SEQ ID NO: 1731 - DNA, 17 bp, Homo sapiens
tcagaaggatggattta

SEQ ID NO: 1732 - DNA, 17 bp, Homo sapiens
cagaaggatggatttac

SEQ ID NO: 1733 - DNA, 17 bp, Homo sapiens
agaaggatggatttact

SEQ ID NO: 1734 - DNA, 17 bp, Homo sapiens
gaaggatggatttactc

SEQ ID NO: 1735 - DNA, 17 bp, Homo sapiens
aaggatggatttactct

SEQ ID NO: 1736 - DNA, 17 bp, Homo sapiens
aggatggatttactctt

SEQ ID NO: 1737 - DNA, 17 bp, Homo sapiens
ggatggatttactcttg

SEQ ID NO: 1738 - DNA, 17 bp, Homo sapiens
gatggatttactcttgc

SEQ ID NO: 1739 - DNA, 17 bp, Homo sapiens
atggatttactcttgct

SEQ ID NO: 1740 - DNA, 17 bp, Homo sapiens
tggatttactcttgcta

SEQ ID NO: 1741 - DNA, 17 bp, Homo sapiens
ggatttactcttgctac

SEQ ID NO: 1742 - DNA, 17 bp, Homo sapiens
gatttactcttgctacg

SEQ ID NO: 1743 - DNA, 17 bp, Homo sapiens
atttactcttgctacgg

SEQ ID NO: 1744 - DNA, 17 bp, Homo sapiens
tttactcttgctacggt

SEQ ID NO: 1745 - DNA, 17 bp, Homo sapiens
ttactcttgctacggtg

SEQ ID NO: 1746 - DNA, 17 bp, Homo sapiens
tactcttgctacggtgc

SEQ ID NO: 1747 - DNA, 17 bp, Homo sapiens
actcttgctacggtgct

SEQ ID NO: 1748 - DNA, 17 bp, Homo sapiens
ctcttgctacggtgcta

SEQ ID NO: 1749 - DNA, 17 bp, Homo sapiens
tcttgctacggtgctaa

SEQ ID NO: 1750 - DNA, 17 bp, Homo sapiens
cttgctacggtgctaaa

SEQ ID NO: 1751 - DNA, 17 bp, Homo sapiens
ttgctacggtgctaaag

SEQ ID NO: 1752 - DNA, 17 bp, Homo sapiens
tgctacggtgctaaagc

SEQ ID NO: 1753 - DNA, 17 bp, Homo sapiens
gctacggtgctaaagcc

SEQ ID NO: 1754 - DNA, 17 bp, Homo sapiens
ctacggtgctaaagcca

SEQ ID NO: 1755 - DNA, 17 bp, Homo sapiens
tacggtgctaaagccag

SEQ ID NO: 1756 - DNA, 17 bp, Homo sapiens
acggtgctaaagccaga

SEQ ID NO: 1757 - DNA, 17 bp, Homo sapiens
cggtgctaaagccagat

SEQ ID NO: 1758 - DNA, 17 bp, Homo sapiens
ggtgctaaagccagatg

SEQ ID NO: 1759 - DNA, 17 bp, Homo sapiens
gtgctaaagccagatga

SEQ ID NO: 1760 - DNA, 17 bp, Homo sapiens
tgctaaagccagatgag

SEQ ID NO: 1761 - DNA, 17 bp, Homo sapiens
gctaaagccagatgagg

SEQ ID NO: 1762 - DNA, 17 bp, Homo sapiens
ctaaagccagatgaggg

SEQ ID NO: 1763 - DNA, 17 bp, Homo sapiens
taaagccagatgaggga

SEQ ID NO: 1764 - DNA, 17 bp, Homo sapiens
aaagccagatgagggaa

SEQ ID NO: 1765 - DNA, 17 bp, Homo sapiens
aagccagatgagggaac

SEQ ID NO: 1766 - DNA, 17 bp, Homo sapiens
agccagatgagggaaca

SEQ ID NO: 1767 - DNA, 17 bp, Homo sapiens
gccagatgagggaacag

SEQ ID NO: 1768 - DNA, 17 bp, Homo sapiens
ccagatgagggaacagc

SEQ ID NO: 1769 - DNA, 17 bp, Homo sapiens
cagatgagggaacagca

SEQ ID NO: 1770 - DNA, 17 bp, Homo sapiens
agatgagggaacagcag

SEQ ID NO: 1771 - DNA, 17 bp, Homo sapiens
gatgagggaacagcaga

SEQ ID NO: 1772 - DNA, 17 bp, Homo sapiens
atgagggaacagcagac

SEQ ID NO: 1773 - DNA, 17 bp, Homo sapiens
tgagggaacagcagacc

SEQ ID NO: 1774 - DNA, 17 bp, Homo sapiens
gagggaacagcagacct

SEQ ID NO: 1775 - DNA, 17 bp, Homo sapiens
agggaacagcagacctg

SEQ ID NO: 1776 - DNA, 17 bp, Homo sapiens
gggaacagcagacctgc

SEQ ID NO: 1777 - DNA, 17 bp, Homo sapiens
ggaacagcagacctgcc

SEQ ID NO: 1778 - DNA, 17 bp, Homo sapiens
gaacagcagacctgcca

SEQ ID NO: 1779 - DNA, 17 bp, Homo sapiens
aacagcagacctgccag

SEQ ID NO: 1780 - DNA, 17 bp, Homo sapiens
acagcagacctgccagc

SEQ ID NO: 1781 - DNA, 17 bp, Homo sapiens
cagcagacctgccagca

SEQ ID NO: 1782 - DNA, 17 bp, Homo sapiens
agcagacctgccagcag

SEQ ID NO: 1783 - DNA, 17 bp, Homo sapiens
gcagacctgccagcagg

SEQ ID NO: 1784 - DNA, 17 bp, Homo sapiens
cagacctgccagcagga

SEQ ID NO: 1785 - DNA, 17 bp, Homo sapiens
agacctgccagcaggaa

SEQ ID NO: 1786 - DNA, 17 bp, Homo sapiens
gacctgccagcaggaag

SEQ ID NO: 1787 - DNA, 17 bp, Homo sapiens
acctgccagcaggaagg

SEQ ID NO: 1788 - DNA, 17 bp, Homo sapiens
cctgccagcaggaaggg

SEQ ID NO: 1789 - DNA, 17 bp, Homo sapiens
ctgccagcaggaagggt

SEQ ID NO: 1790 - DNA, 17 bp, Homo sapiens
tgccagcaggaagggtg

SEQ ID NO: 1791 - DNA, 17 bp, Homo sapiens
gccagcaggaagggtga

SEQ ID NO: 1792 - DNA, 17 bp, Homo sapiens
ccagcaggaagggtgag

SEQ ID NO: 1793 - DNA, 17 bp, Homo sapiens
cagcaggaagggtgaga

SEQ ID NO: 1794 - DNA, 17 bp, Homo sapiens
agcaggaagggtgagac

SEQ ID NO: 1795 - DNA, 17 bp, Homo sapiens
gcaggaagggtgagact

SEQ ID NO: 1796 - DNA, 17 bp, Homo sapiens
caggaagggtgagactt

SEQ ID NO: 1797 - DNA, 17 bp, Homo sapiens
aggaagggtgagacttt

SEQ ID NO: 1798 - DNA, 17 bp, Homo sapiens
ggaagggtgagactttg

SEQ ID NO: 1799 - DNA, 17 bp, Homo sapiens
gaagggtgagactttgc

SEQ ID NO: 1800 - DNA, 17 bp, Homo sapiens
aagggtgagactttgca

SEQ ID NO: 1801 - DNA, 17 bp, Homo sapiens
agggtgagactttgcat

SEQ ID NO: 1802 - DNA, 17 bp, Homo sapiens
gggtgagactttgcatt

SEQ ID NO: 1803 - DNA, 17 bp, Homo sapiens
ggtgagactttgcattg

SEQ ID NO: 1804 - DNA, 17 bp, Homo sapiens
gtgagactttgcattga

SEQ ID NO: 1805 - DNA, 17 bp, Homo sapiens
tgagactttgcattgat

SEQ ID NO: 1806 - DNA, 17 bp, Homo sapiens
gagactttgcattgatg

SEQ ID NO: 1807 - DNA, 17 bp, Homo sapiens
agactttgcattgatgc

SEQ ID NO: 1808 - DNA, 17 bp, Homo sapiens
gactttgcattgatgct

SEQ ID NO: 1809 - DNA, 17 bp, Homo sapiens
actttgcattgatgctg

SEQ ID NO: 1810 - DNA, 17 bp, Homo sapiens
ctttgcattgatgctga

SEQ ID NO: 1811 - DNA, 17 bp, Homo sapiens
tttgcattgatgctgac

SEQ ID NO: 1812 - DNA, 17 bp, Homo sapiens
ttgcattgatgctgaca

SEQ ID NO: 1813 - DNA, 17 bp, Homo sapiens
tgcattgatgctgacaa

SEQ ID NO: 1814 - DNA, 17 bp, Homo sapiens
gcattgatgctgacaaa

SEQ ID NO: 1815 - DNA, 17 bp, Homo sapiens
cattgatgctgacaaaa

SEQ ID NO: 1816 - DNA, 17 bp, Homo sapiens
attgatgctgacaaaac

SEQ ID NO: 1817 - DNA, 17 bp, Homo sapiens
ttgatgctgacaaaacc

SEQ ID NO: 1818 - DNA, 17 bp, Homo sapiens
tgatgctgacaaaacca

SEQ ID NO: 1819 - DNA, 17 bp, Homo sapiens
gatgctgacaaaaccat

SEQ ID NO: 1820 - DNA, 17 bp, Homo sapiens
atgctgacaaaaccatc

SEQ ID NO: 1821 - DNA, 17 bp, Homo sapiens
tgctgacaaaaccatca

SEQ ID NO: 1822 - DNA, 17 bp, Homo sapiens
gctgacaaaaccatcac

SEQ ID NO: 1823 - DNA, 17 bp, Homo sapiens
ctgacaaaaccatcact

SEQ ID NO: 1824 - DNA, 17 bp, Homo sapiens
tgacaaaaccatcactg

SEQ ID NO: 1825 - DNA, 17 bp, Homo sapiens
gacaaaaccatcactga

SEQ ID NO: 1826 - DNA, 17 bp, Homo sapiens
acaaaaccatcactgag

SEQ ID NO: 1827 - DNA, 17 bp, Homo sapiens
caaaaccatcactgagg

SEQ ID NO: 1828 - DNA, 17 bp, Homo sapiens
aaaaccatcactgaggt

SEQ ID NO: 1829 - DNA, 17 bp, Homo sapiens
aaaccatcactgaggtg

SEQ ID NO: 1830 - DNA, 17 bp, Homo sapiens
aaccatcactgaggtgg

SEQ ID NO: 1831 - DNA, 17 bp, Homo sapiens
accatcactgaggtgga

SEQ ID NO: 1832 - DNA, 17 bp, Homo sapiens
ccatcactgaggtggat

SEQ ID NO: 1833 - DNA, 17 bp, Homo sapiens
catcactgaggtggatg

SEQ ID NO: 1834 - DNA, 17 bp, Homo sapiens
atcactgaggtggatga

SEQ ID NO: 1835 - DNA, 17 bp, Homo sapiens
tcactgaggtggatgag

SEQ ID NO: 1836 - DNA, 17 bp, Homo sapiens
cactgaggtggatgagg

SEQ ID NO: 1837 - DNA, 17 bp, Homo sapiens
actgaggtggatgagga

SEQ ID NO: 1838 - DNA, 17 bp, Homo sapiens
ctgaggtggatgaggag

SEQ ID NO: 1839 - DNA, 17 bp, Homo sapiens
tgaggtggatgaggagc

SEQ ID NO: 1840 - DNA, 17 bp, Homo sapiens
gaggtggatgaggagca

SEQ ID NO: 1841 - DNA, 17 bp, Homo sapiens
aggtggatgaggagcat

SEQ ID NO: 1842 - DNA, 17 bp, Homo sapiens
ggtggatgaggagcatg

SEQ ID NO: 1843 - DNA, 17 bp, Homo sapiens
gtggatgaggagcatgt

SEQ ID NO: 1844 - DNA, 17 bp, Homo sapiens
tggatgaggagcatgtc

SEQ ID NO: 1845 - DNA, 17 bp, Homo sapiens
ggatgaggagcatgtcc

SEQ ID NO: 1846 - DNA, 17 bp, Homo sapiens
gatgaggagcatgtcca

SEQ ID NO: 1847 - DNA, 17 bp, Homo sapiens
atgaggagcatgtccat

SEQ ID NO: 1848 - DNA, 17 bp, Homo sapiens
tgaggagcatgtccatc

SEQ ID NO: 1849 - DNA, 17 bp, Homo sapiens
gaggagcatgtccatcg

SEQ ID NO: 1850 - DNA, 17 bp, Homo sapiens
aggagcatgtccatcgg

SEQ ID NO: 1851 - DNA, 17 bp, Homo sapiens
ggagcatgtccatcggg

SEQ ID NO: 1852 - DNA, 17 bp, Homo sapiens
gagcatgtccatcgggc

SEQ ID NO: 1853 - DNA, 17 bp, Homo sapiens
agcatgtccatcgggcc

SEQ ID NO: 1854 - DNA, 17 bp, Homo sapiens
gcatgtccatcgggcca

SEQ ID NO: 1855 - DNA, 17 bp, Homo sapiens
catgtccatcgggccaa

SEQ ID NO: 1856 - DNA, 17 bp, Homo sapiens
atgtccatcgggccaac

SEQ ID NO: 1857 - DNA, 17 bp, Homo sapiens
tgtccatcgggccaacc

SEQ ID NO: 1858 - DNA, 17 bp, Homo sapiens
gtccatcgggccaaccc

SEQ ID NO: 1859 - DNA, 17 bp, Homo sapiens
tccatcgggccaaccct

SEQ ID NO: 1860 - DNA, 17 bp, Homo sapiens
ccatcgggccaaccctc

SEQ ID NO: 1861 - DNA, 17 bp, Homo sapiens
catcgggccaaccctcc

SEQ ID NO: 1862 - DNA, 17 bp, Homo sapiens
atcgggccaaccctcct

SEQ ID NO: 1863 - DNA, 17 bp, Homo sapiens
tcgggccaaccctcctg

SEQ ID NO: 1864 - DNA, 17 bp, Homo sapiens
cgggccaaccctcctga

SEQ ID NO: 1865 - DNA, 17 bp, Homo sapiens
gggccaaccctcctgag

SEQ ID NO: 1866 - DNA, 17 bp, Homo sapiens
ggccaaccctcctgagc

SEQ ID NO: 1867 - DNA, 17 bp, Homo sapiens
gccaaccctcctgagct

SEQ ID NO: 1868 - DNA, 17 bp, Homo sapiens
ccaaccctcctgagctg

SEQ ID NO: 1869 - DNA, 17 bp, Homo sapiens
caaccctcctgagctgg

SEQ ID NO: 1870 - DNA, 17 bp, Homo sapiens
aaccctcctgagctgga

SEQ ID NO: 1871 - DNA, 17 bp, Homo sapiens
accctcctgagctggac

SEQ ID NO: 1872 - DNA, 17 bp, Homo sapiens
ccctcctgagctggacc

SEQ ID NO: 1873 - DNA, 17 bp, Homo sapiens
cctcctgagctggacca

SEQ ID NO: 1874 - DNA, 17 bp, Homo sapiens
ctcctgagctggaccag

SEQ ID NO: 1875 - DNA, 17 bp, Homo sapiens
tcctgagctggaccagg

SEQ ID NO: 1876 - DNA, 17 bp, Homo sapiens
cctgagctggaccaggt

SEQ ID NO: 1877 - DNA, 17 bp, Homo sapiens
ctgagctggaccaggtc

SEQ ID NO: 1878 - DNA, 17 bp, Homo sapiens
tgagctggaccaggtcg

SEQ ID NO: 1879 - DNA, 17 bp, Homo sapiens
gagctggaccaggtcga

SEQ ID NO: 1880 - DNA, 17 bp, Homo sapiens
agctggaccaggtcgag

SEQ ID NO: 1881 - DNA, 17 bp, Homo sapiens
gctggaccaggtcgagg

SEQ ID NO: 1882 - DNA, 17 bp, Homo sapiens
ctggaccaggtcgagga

SEQ ID NO: 1883 - DNA, 17 bp, Homo sapiens
tggaccaggtcgaggac

SEQ ID NO: 1884 - DNA, 17 bp, Homo sapiens
ggaccaggtcgaggacc

SEQ ID NO: 1885 - DNA, 17 bp, Homo sapiens
gaccaggtcgaggacct

SEQ ID NO: 1886 - DNA, 17 bp, Homo sapiens
accaggtcgaggacctg

SEQ ID NO: 1887 - DNA, 17 bp, Homo sapiens
ccaggtcgaggacctgg

SEQ ID NO: 1888 - DNA, 17 bp, Homo sapiens
caggtcgaggacctggc

SEQ ID NO: 1889 - DNA, 17 bp, Homo sapiens
aggtcgaggacctggcc

SEQ ID NO: 1890 - DNA, 17 bp, Homo sapiens
ggtcgaggacctggcct

SEQ ID NO: 1891 - DNA, 17 bp, Homo sapiens
gtcgaggacctggcctc

SEQ ID NO: 1892 - DNA, 17 bp, Homo sapiens
tcgaggacctggcctct

SEQ ID NO: 1893 - DNA, 17 bp, Homo sapiens
cgaggacctggcctctc

SEQ ID NO: 1894 - DNA, 17 bp, Homo sapiens
gaggacctggcctctct

SEQ ID NO: 1895 - DNA, 17 bp, Homo sapiens
aggacctggcctctctc

SEQ ID NO: 1896 - DNA, 17 bp, Homo sapiens
ggacctggcctctctca

SEQ ID NO: 1897 - DNA, 17 bp, Homo sapiens
gacctggcctctctcat

SEQ ID NO: 1898 - DNA, 17 bp, Homo sapiens
acctggcctctctcatc

SEQ ID NO: 1899 - DNA, 17 bp, Homo sapiens
cctggcctctctcatca

SEQ ID NO: 1900 - DNA, 17 bp, Homo sapiens
ctggcctctctcatcag

SEQ ID NO: 1901 - DNA, 17 bp, Homo sapiens
tggcctctctcatcagt

SEQ ID NO: 1902 - DNA, 17 bp, Homo sapiens
ggcctctctcatcagtg

SEQ ID NO: 1903 - DNA, 17 bp, Homo sapiens
gcctctctcatcagtgt

SEQ ID NO: 1904 - DNA, 17 bp, Homo sapiens
cctctctcatcagtgtc

SEQ ID NO: 1905 - DNA, 17 bp, Homo sapiens
ctctctcatcagtgtca

SEQ ID NO: 1906 - DNA, 17 bp, Homo sapiens
tctctcatcagtgtcaa

SEQ ID NO: 1907 - DNA, 17 bp, Homo sapiens
ctctcatcagtgtcaac

SEQ ID NO: 1908 - DNA, 17 bp, Homo sapiens
tctcatcagtgtcaacg

SEQ ID NO: 1909 - DNA, 17 bp, Homo sapiens
ctcatcagtgtcaacga

SEQ ID NO: 1910 - DNA, 17 bp, Homo sapiens
tcatcagtgtcaacgaa

SEQ ID NO: 1911 - DNA, 17 bp, Homo sapiens
catcagtgtcaacgaat

SEQ ID NO: 1912 - DNA, 17 bp, Homo sapiens
atcagtgtcaacgaatc

SEQ ID NO: 1913 - DNA, 17 bp, Homo sapiens
tcagtgtcaacgaatcc

SEQ ID NO: 1914 - DNA, 17 bp, Homo sapiens
cagtgtcaacgaatcca

SEQ ID NO: 1915 - DNA, 17 bp, Homo sapiens
agtgtcaacgaatccag

SEQ ID NO: 1916 - DNA, 17 bp, Homo sapiens
gtgtcaacgaatccagt

SEQ ID NO: 1917 - DNA, 17 bp, Homo sapiens
tgtcaacgaatccagtg

SEQ ID NO: 1918 - DNA, 17 bp, Homo sapiens
gtcaacgaatccagtgt

SEQ ID NO: 1919 - DNA, 17 bp, Homo sapiens
tcaacgaatccagtgtc

SEQ ID NO: 1920 - DNA, 17 bp, Homo sapiens
caacgaatccagtgtcc

SEQ ID NO: 1921 - DNA, 17 bp, Homo sapiens
aacgaatccagtgtcct

SEQ ID NO: 1922 - DNA, 17 bp, Homo sapiens
acgaatccagtgtcctg

SEQ ID NO: 1923 - DNA, 17 bp, Homo sapiens
cgaatccagtgtcctga

SEQ ID NO: 1924 - DNA, 17 bp, Homo sapiens
gaatccagtgtcctgaa

SEQ ID NO: 1925 - DNA, 17 bp, Homo sapiens
aatccagtgtcctgaac

SEQ ID NO: 1926 - DNA, 17 bp, Homo sapiens
atccagtgtcctgaaca

SEQ ID NO: 1927 - DNA, 17 bp, Homo sapiens
tccagtgtcctgaacac

SEQ ID NO: 1928 - DNA, 17 bp, Homo sapiens
ccagtgtcctgaacacg

SEQ ID NO: 1929 - DNA, 17 bp, Homo sapiens
cagtgtcctgaacacgc

SEQ ID NO: 1930 - DNA, 17 bp, Homo sapiens
agtgtcctgaacacgct

SEQ ID NO: 1931 - DNA, 17 bp, Homo sapiens
gtgtcctgaacacgctt

SEQ ID NO: 1932 - DNA, 17 bp, Homo sapiens
tgtcctgaacacgcttc

SEQ ID NO: 1933 - DNA, 17 bp, Homo sapiens
gtcctgaacacgcttct

SEQ ID NO: 1934 - DNA, 17 bp, Homo sapiens
tcctgaacacgcttctg

SEQ ID NO: 1935 - DNA, 17 bp, Homo sapiens
cctgaacacgcttctgc

SEQ ID NO: 1936 - DNA, 17 bp, Homo sapiens
ctgaacacgcttctgca

SEQ ID NO: 1937 - DNA, 17 bp, Homo sapiens
tgaacacgcttctgcag

SEQ ID NO: 1938 - DNA, 17 bp, Homo sapiens
gaacacgcttctgcagc

SEQ ID NO: 1939 - DNA, 17 bp, Homo sapiens
aacacgcttctgcagcg

SEQ ID NO: 1940 - DNA, 17 bp, Homo sapiens
acacgcttctgcagcgc

SEQ ID NO: 1941 - DNA, 17 bp, Homo sapiens
cacgcttctgcagcgct

SEQ ID NO: 1942 - DNA, 17 bp, Homo sapiens
acgcttctgcagcgcta

SEQ ID NO: 1943 - DNA, 17 bp, Homo sapiens
cgcttctgcagcgctac

SEQ ID NO: 1944 - DNA, 17 bp, Homo sapiens
gcttctgcagcgctaca

SEQ ID NO: 1945 - DNA, 17 bp, Homo sapiens
cttctgcagcgctacaa

SEQ ID NO: 1946 - DNA, 17 bp, Homo sapiens
ttctgcagcgctacaaa

SEQ ID NO: 1947 - DNA, 17 bp, Homo sapiens
tctgcagcgctacaaag

SEQ ID NO: 1948 - DNA, 17 bp, Homo sapiens
ctgcagcgctacaaagc

SEQ ID NO: 1949 - DNA, 17 bp, Homo sapiens
tgcagcgctacaaagct

SEQ ID NO: 1950 - DNA, 17 bp, Homo sapiens
gcagcgctacaaagctc

SEQ ID NO: 1951 - DNA, 17 bp, Homo sapiens
cagcgctacaaagctca

SEQ ID NO: 1952 - DNA, 17 bp, Homo sapiens
agcgctacaaagctcag

SEQ ID NO: 1953 - DNA, 17 bp, Homo sapiens
gcgctacaaagctcagc

SEQ ID NO: 1954 - DNA, 17 bp, Homo sapiens
cgctacaaagctcagct

SEQ ID NO: 1955 - DNA, 17 bp, Homo sapiens
gctacaaagctcagctg

SEQ ID NO: 1956 - DNA, 17 bp, Homo sapiens
ctacaaagctcagctgc

SEQ ID NO: 1957 - DNA, 17 bp, Homo sapiens
tacaaagctcagctgct

SEQ ID NO: 1958 - DNA, 17 bp, Homo sapiens
acaaagctcagctgctg

SEQ ID NO: 1959 - DNA, 17 bp, Homo sapiens
caaagctcagctgctgc

SEQ ID NO: 1960 - DNA, 17 bp, Homo sapiens
aaagctcagctgctgca

SEQ ID NO: 1961 - DNA, 17 bp, Homo sapiens
aagctcagctgctgcac

SEQ ID NO: 1962 - DNA, 17 bp, Homo sapiens
agctcagctgctgcaca

SEQ ID NO: 1963 - DNA, 17 bp, Homo sapiens
gctcagctgctgcacac

SEQ ID NO: 1964 - DNA, 17 bp, Homo sapiens
ctcagctgctgcacacc

SEQ ID NO: 1965 - DNA, 17 bp, Homo sapiens
tcagctgctgcacacct

SEQ ID NO: 1966 - DNA, 17 bp, Homo sapiens
cagctgctgcacacctg

SEQ ID NO: 1967 - DNA, 17 bp, Homo sapiens
agctgctgcacacctgc

SEQ ID NO: 1968 - DNA, 17 bp, Homo sapiens
gctgctgcacacctgca

SEQ ID NO: 1969 - DNA, 17 bp, Homo sapiens
ctgctgcacacctgcac

SEQ ID NO: 1970 - DNA, 17 bp, Homo sapiens
tgctgcacacctgcaca

SEQ ID NO: 1971 - DNA, 17 bp, Homo sapiens
gctgcacacctgcacag

SEQ ID NO: 1972 - DNA, 17 bp, Homo sapiens
ctgcacacctgcacagg

SEQ ID NO: 1973 - DNA, 17 bp, Homo sapiens
tgcacacctgcacaggg

SEQ ID NO: 1974 - DNA, 17 bp, Homo sapiens
gcacacctgcacagggc

SEQ ID NO: 1975 - DNA, 17 bp, Homo sapiens
cacacctgcacagggcc

SEQ ID NO: 1976 - DNA, 17 bp, Homo sapiens
acacctgcacagggcct

SEQ ID NO: 1977 - DNA, 17 bp, Homo sapiens
cacctgcacagggcctg

SEQ ID NO: 1978 - DNA, 17 bp, Homo sapiens
acctgcacagggcctga

SEQ ID NO: 1979 - DNA, 17 bp, Homo sapiens
cctgcacagggcctgat

SEQ ID NO: 1980 - DNA, 17 bp, Homo sapiens
ctgcacagggcctgatc

SEQ ID NO: 1981 - DNA, 17 bp, Homo sapiens
tgcacagggcctgatct

SEQ ID NO: 1982 - DNA, 17 bp, Homo sapiens
gcacagggcctgatctg

SEQ ID NO: 1983 - DNA, 17 bp, Homo sapiens
cacagggcctgatctga

SEQ ID NO: 1984 - DNA, 17 bp, Homo sapiens
acagggcctgatctgat

SEQ ID NO: 1985 - DNA, 17 bp, Homo sapiens
cagggcctgatctgatt

SEQ ID NO: 1986 - DNA, 17 bp, Homo sapiens
agggcctgatctgattg

SEQ ID NO: 1987 - DNA, 17 bp, Homo sapiens
gggcctgatctgattgt

SEQ ID NO: 1988 - DNA, 17 bp, Homo sapiens
ggcctgatctgattgtc

SEQ ID NO: 1989 - DNA, 17 bp, Homo sapiens
gcctgatctgattgtcc

SEQ ID NO: 1990 - DNA, 17 bp, Homo sapiens
cctgatctgattgtcct

SEQ ID NO: 1991 - DNA, 17 bp, Homo sapiens
ctgatctgattgtcctc

SEQ ID NO: 1992 - DNA, 17 bp, Homo sapiens
tgatctgattgtcctcc

SEQ ID NO: 1993 - DNA, 17 bp, Homo sapiens
gatctgattgtcctcca

SEQ ID NO: 1994 - DNA, 17 bp, Homo sapiens
atctgattgtcctccag

SEQ ID NO: 1995 - DNA, 17 bp, Homo sapiens
tctgattgtcctccagc

SEQ ID NO: 1996 - DNA, 17 bp, Homo sapiens
ctgattgtcctccagcc

SEQ ID NO: 1997 - DNA, 17 bp, Homo sapiens
tgattgtcctccagccc

SEQ ID NO: 1998 - DNA, 17 bp, Homo sapiens
gattgtcctccagcccc

SEQ ID NO: 1999 - DNA, 17 bp, Homo sapiens
attgtcctccagccccg

SEQ ID NO: 2000 - DNA, 17 bp, Homo sapiens
ttgtcctccagccccgg

SEQ ID NO: 2001 - DNA, 17 bp, Homo sapiens
tgtcctccagccccggg

SEQ ID NO: 2002 - DNA, 17 bp, Homo sapiens
gtcctccagccccgggg

SEQ ID NO: 2003 - DNA, 17 bp, Homo sapiens
tcctccagccccggggg

SEQ ID NO: 2004 - DNA, 17 bp, Homo sapiens
cctccagccccgggggc

SEQ ID NO: 2005 - DNA, 17 bp, Homo sapiens
ctccagccccgggggcc

SEQ ID NO: 2006 - DNA, 17 bp, Homo sapiens
tccagccccgggggccc

SEQ ID NO: 2007 - DNA, 17 bp, Homo sapiens
ccagccccgggggccct

SEQ ID NO: 2008 - DNA, 17 bp, Homo sapiens
cagccccgggggccctc

SEQ ID NO: 2009 - DNA, 17 bp, Homo sapiens
agccccgggggccctcg

SEQ ID NO: 2010 - DNA, 17 bp, Homo sapiens
gccccgggggccctcgg

SEQ ID NO: 2011 - DNA, 17 bp, Homo sapiens
ccccgggggccctcggt

SEQ ID NO: 2012 - DNA, 17 bp, Homo sapiens
cccgggggccctcggtg

SEQ ID NO: 2013 - DNA, 17 bp, Homo sapiens
ccgggggccctcggtgc

SEQ ID NO: 2014 - DNA, 17 bp, Homo sapiens
cgggggccctcggtgcc

SEQ ID NO: 2015 - DNA, 17 bp, Homo sapiens
gggggccctcggtgcct

SEQ ID NO: 2016 - DNA, 17 bp, Homo sapiens
ggggccctcggtgcctt

SEQ ID NO: 2017 - DNA, 17 bp, Homo sapiens
gggccctcggtgccttc

SEQ ID NO: 2018 - DNA, 17 bp, Homo sapiens
ggccctcggtgccttct

SEQ ID NO: 2019 - DNA, 17 bp, Homo sapiens
gccctcggtgccttctg

SEQ ID NO: 2020 - DNA, 17 bp, Homo sapiens
ccctcggtgccttctgc

SEQ ID NO: 2021 - DNA, 17 bp, Homo sapiens
cctcggtgccttctgca

SEQ ID NO: 2022 - DNA, 17 bp, Homo sapiens
ctcggtgccttctgcag

SEQ ID NO: 2023 - DNA, 17 bp, Homo sapiens
tcggtgccttctgcagg

SEQ ID NO: 2024 - DNA, 17 bp, Homo sapiens
cggtgccttctgcaggg

SEQ ID NO: 2025 - DNA, 17 bp, Homo sapiens
ggtgccttctgcaggga

SEQ ID NO: 2026 - DNA, 17 bp, Homo sapiens
gtgccttctgcagggaa

SEQ ID NO: 2027 - DNA, 17 bp, Homo sapiens
tgccttctgcagggaag

SEQ ID NO: 2028 - DNA, 17 bp, Homo sapiens
gccttctgcagggaagg

SEQ ID NO: 2029 - DNA, 17 bp, Homo sapiens
ccttctgcagggaaggt

SEQ ID NO: 2030 - DNA, 17 bp, Homo sapiens
cttctgcagggaaggtg

SEQ ID NO: 2031 - DNA, 17 bp, Homo sapiens
ttctgcagggaaggtgc

SEQ ID NO: 2032 - DNA, 17 bp, Homo sapiens
tctgcagggaaggtgcc

SEQ ID NO: 2033 - DNA, 17 bp, Homo sapiens
ctgcagggaaggtgccc

SEQ ID NO: 2034 - DNA, 17 bp, Homo sapiens
tgcagggaaggtgccca

SEQ ID NO: 2035 - DNA, 17 bp, Homo sapiens
gcagggaaggtgcccaa

SEQ ID NO: 2036 - DNA, 17 bp, Homo sapiens
cagggaaggtgcccaag

SEQ ID NO: 2037 - DNA, 17 bp, Homo sapiens
agggaaggtgcccaagg

SEQ ID NO: 2038 - DNA, 17 bp, Homo sapiens
gggaaggtgcccaaggg

SEQ ID NO: 2039 - DNA, 17 bp, Homo sapiens
ggaaggtgcccaagggc

SEQ ID NO: 2040 - DNA, 17 bp, Homo sapiens
gaaggtgcccaagggcc

SEQ ID NO: 2041 - DNA, 17 bp, Homo sapiens
aaggtgcccaagggccg

SEQ ID NO: 2042 - DNA, 17 bp, Homo sapiens
aggtgcccaagggccgc

SEQ ID NO: 2043 - DNA, 17 bp, Homo sapiens
ggtgcccaagggccgcc

SEQ ID NO: 2044 - DNA, 17 bp, Homo sapiens
gtgcccaagggccgccg

SEQ ID NO: 2045 - DNA, 17 bp, Homo sapiens
tgcccaagggccgccgg

SEQ ID NO: 2046 - DNA, 17 bp, Homo sapiens
gcccaagggccgccggg

SEQ ID NO: 2047 - DNA, 17 bp, Homo sapiens
cccaagggccgccggga

SEQ ID NO: 2048 - DNA, 17 bp, Homo sapiens
ccaagggccgccgggat

SEQ ID NO: 2049 - DNA, 17 bp, Homo sapiens
caagggccgccgggatg

SEQ ID NO: 2050 - DNA, 17 bp, Homo sapiens
aagggccgccgggatgg

SEQ ID NO: 2051 - DNA, 17 bp, Homo sapiens
agggccgccgggatggc

SEQ ID NO: 2052 - DNA, 17 bp, Homo sapiens
gggccgccgggatggcc

SEQ ID NO: 2053 - DNA, 17 bp, Homo sapiens
ggccgccgggatggcct

SEQ ID NO: 2054 - DNA, 17 bp, Homo sapiens
gccgccgggatggcctg

SEQ ID NO: 2055 - DNA, 17 bp, Homo sapiens
ccgccgggatggcctgc

SEQ ID NO: 2056 - DNA, 17 bp, Homo sapiens
cgccgggatggcctgcc

SEQ ID NO: 2057 - DNA, 17 bp, Homo sapiens
gccgggatggcctgcct

SEQ ID NO: 2058 - DNA, 17 bp, Homo sapiens
ccgggatggcctgcctg

SEQ ID NO: 2059 - DNA, 17 bp, Homo sapiens
cgggatggcctgcctgc

SEQ ID NO: 2060 - DNA, 17 bp, Homo sapiens
gggatggcctgcctgcc

SEQ ID NO: 2061 - DNA, 17 bp, Homo sapiens
ggatggcctgcctgccc

SEQ ID NO: 2062 - DNA, 17 bp, Homo sapiens
gatggcctgcctgccca

SEQ ID NO: 2063 - DNA, 17 bp, Homo sapiens
atggcctgcctgcccac

SEQ ID NO: 2064 - DNA, 17 bp, Homo sapiens
tggcctgcctgcccaca

SEQ ID NO: 2065 - DNA, 17 bp, Homo sapiens
ggcctgcctgcccacat

SEQ ID NO: 2066 - DNA, 17 bp, Homo sapiens
gcctgcctgcccacatt

SEQ ID NO: 2067 - DNA, 17 bp, Homo sapiens
cctgcctgcccacattg

SEQ ID NO: 2068 - DNA, 17 bp, Homo sapiens
ctgcctgcccacattgg

SEQ ID NO: 2069 - DNA, 17 bp, Homo sapiens
tgcctgcccacattggc

SEQ ID NO: 2070 - DNA, 17 bp, Homo sapiens
gcctgcccacattggct

SEQ ID NO: 2071 - DNA, 17 bp, Homo sapiens
cctgcccacattggctc

SEQ ID NO: 2072 - DNA, 17 bp, Homo sapiens
ctgcccacattggctcc

SEQ ID NO: 2073 - DNA, 17 bp, Homo sapiens
tgcccacattggctcca

SEQ ID NO: 2074 - DNA, 17 bp, Homo sapiens
gcccacattggctccat

SEQ ID NO: 2075 - DNA, 17 bp, Homo sapiens
cccacattggctccatg

SEQ ID NO: 2076 - DNA, 17 bp, Homo sapiens
ccacattggctccatgg

SEQ ID NO: 2077 - DNA, 17 bp, Homo sapiens
cacattggctccatggc

SEQ ID NO: 2078 - DNA, 17 bp, Homo sapiens
acattggctccatggca

SEQ ID NO: 2079 - DNA, 17 bp, Homo sapiens
cattggctccatggcac

SEQ ID NO: 2080 - DNA, 17 bp, Homo sapiens
attggctccatggcaca

SEQ ID NO: 2081 - DNA, 17 bp, Homo sapiens
ttggctccatggcacag

SEQ ID NO: 2082 - DNA, 17 bp, Homo sapiens
tggctccatggcacagc

SEQ ID NO: 2083 - DNA, 17 bp, Homo sapiens
ggctccatggcacagcg

SEQ ID NO: 2084 - DNA, 17 bp, Homo sapiens
gctccatggcacagcgg

SEQ ID NO: 2085 - DNA, 17 bp, Homo sapiens
ctccatggcacagcggg

SEQ ID NO: 2086 - DNA, 17 bp, Homo sapiens
tccatggcacagcgggc

SEQ ID NO: 2087 - DNA, 17 bp, Homo sapiens
ccatggcacagcgggca

SEQ ID NO: 2088 - DNA, 17 bp, Homo sapiens
catggcacagcgggcat

SEQ ID NO: 2089 - DNA, 17 bp, Homo sapiens
atggcacagcgggcata

SEQ ID NO: 2090 - DNA, 17 bp, Homo sapiens
tggcacagcgggcatac

SEQ ID NO: 2091 - DNA, 17 bp, Homo sapiens
ggcacagcgggcatact

SEQ ID NO: 2092 - DNA, 17 bp, Homo sapiens
gcacagcgggcatactg

SEQ ID NO: 2093 - DNA, 17 bp, Homo sapiens
cacagcgggcatactgg

SEQ ID NO: 2094 - DNA, 17 bp, Homo sapiens
acagcgggcatactggg

SEQ ID NO: 2095 - DNA, 17 bp, Homo sapiens
cagcgggcatactgggc

SEQ ID NO: 2096 - DNA, 17 bp, Homo sapiens
agcgggcatactgggcg

SEQ ID NO: 2097 - DNA, 17 bp, Homo sapiens
gcgggcatactgggcgc

SEQ ID NO: 2098 - DNA, 17 bp, Homo sapiens
cgggcatactgggcgct

SEQ ID NO: 2099 - DNA, 17 bp, Homo sapiens
gggcatactgggcgctg

SEQ ID NO: 2100 - DNA, 17 bp, Homo sapiens
ggcatactgggcgctgc

SEQ ID NO: 2101 - DNA, 17 bp, Homo sapiens
gcatactgggcgctgct

SEQ ID NO: 2102 - DNA, 17 bp, Homo sapiens
catactgggcgctgctg

SEQ ID NO: 2103 - DNA, 17 bp, Homo sapiens
atactgggcgctgctga

SEQ ID NO: 2104 - DNA, 17 bp, Homo sapiens
tactgggcgctgctgaa

SEQ ID NO: 2105 - DNA, 17 bp, Homo sapiens
actgggcgctgctgaac

SEQ ID NO: 2106 - DNA, 17 bp, Homo sapiens
ctgggcgctgctgaacc

SEQ ID NO: 2107 - DNA, 17 bp, Homo sapiens
tgggcgctgctgaacca

SEQ ID NO: 2108 - DNA, 17 bp, Homo sapiens
gggcgctgctgaaccag

SEQ ID NO: 2109 - DNA, 17 bp, Homo sapiens
ggcgctgctgaaccagc

SEQ ID NO: 2110 - DNA, 17 bp, Homo sapiens
gcgctgctgaaccagcg

SEQ ID NO: 2111 - DNA, 17 bp, Homo sapiens
cgctgctgaaccagcgg

SEQ ID NO: 2112 - DNA, 17 bp, Homo sapiens
gctgctgaaccagcgga

SEQ ID NO: 2113 - DNA, 17 bp, Homo sapiens
ctgctgaaccagcggag

SEQ ID NO: 2114 - DNA, 17 bp, Homo sapiens
tgctgaaccagcggaga

SEQ ID NO: 2115 - DNA, 17 bp, Homo sapiens
gctgaaccagcggagag

SEQ ID NO: 2116 - DNA, 17 bp, Homo sapiens
ctgaaccagcggagaga

SEQ ID NO: 2117 - DNA, 17 bp, Homo sapiens
tgaaccagcggagagac

SEQ ID NO: 2118 - DNA, 17 bp, Homo sapiens
gaaccagcggagagacc

SEQ ID NO: 2119 - DNA, 17 bp, Homo sapiens
aaccagcggagagacca

SEQ ID NO: 2120 - DNA, 17 bp, Homo sapiens
accagcggagagaccag

SEQ ID NO: 2121 - DNA, 17 bp, Homo sapiens
ccagcggagagaccaga

SEQ ID NO: 2122 - DNA, 17 bp, Homo sapiens
cagcggagagaccagag

SEQ ID NO: 2123 - DNA, 17 bp, Homo sapiens
agcggagagaccagagc

SEQ ID NO: 2124 - DNA, 17 bp, Homo sapiens
gcggagagaccagagca

SEQ ID NO: 2125 - DNA, 17 bp, Homo sapiens
cggagagaccagagcat

SEQ ID NO: 2126 - DNA, 17 bp, Homo sapiens
ggagagaccagagcatt

SEQ ID NO: 2127 - DNA, 17 bp, Homo sapiens
gagagaccagagcattg

SEQ ID NO: 2128 - DNA, 17 bp, Homo sapiens
agagaccagagcattgt

SEQ ID NO: 2129 - DNA, 17 bp, Homo sapiens
gagaccagagcattgtg

SEQ ID NO: 2130 - DNA, 17 bp, Homo sapiens
agaccagagcattgtgg

SEQ ID NO: 2131 - DNA, 17 bp, Homo sapiens
gaccagagcattgtggc

SEQ ID NO: 2132 - DNA, 17 bp, Homo sapiens
accagagcattgtggcc

SEQ ID NO: 2133 - DNA, 17 bp, Homo sapiens
ccagagcattgtggccc

SEQ ID NO: 2134 - DNA, 17 bp, Homo sapiens
cagagcattgtggccct

SEQ ID NO: 2135 - DNA, 17 bp, Homo sapiens
agagcattgtggccctg

SEQ ID NO: 2136 - DNA, 17 bp, Homo sapiens
gagcattgtggccctgg

SEQ ID NO: 2137 - DNA, 17 bp, Homo sapiens
agcattgtggccctggg

SEQ ID NO: 2138 - DNA, 17 bp, Homo sapiens
gcattgtggccctgggc

SEQ ID NO: 2139 - DNA, 17 bp, Homo sapiens
cattgtggccctgggcc

SEQ ID NO: 2140 - DNA, 17 bp, Homo sapiens
attgtggccctgggccg

SEQ ID NO: 2141 - DNA, 17 bp, Homo sapiens
ttgtggccctgggccgg

SEQ ID NO: 2142 - DNA, 17 bp, Homo sapiens
tgtggccctgggccgga

SEQ ID NO: 2143 - DNA, 17 bp, Homo sapiens
gtggccctgggccggag

SEQ ID NO: 2144 - DNA, 17 bp, Homo sapiens
tggccctgggccggagt

SEQ ID NO: 2145 - DNA, 17 bp, Homo sapiens
ggccctgggccggagtg

SEQ ID NO: 2146 - DNA, 17 bp, Homo sapiens
gccctgggccggagtgg

SEQ ID NO: 2147 - DNA, 17 bp, Homo sapiens
ccctgggccggagtggc

SEQ ID NO: 2148 - DNA, 17 bp, Homo sapiens
cctgggccggagtggcg

SEQ ID NO: 2149 - DNA, 17 bp, Homo sapiens
ctgggccggagtggcgc

SEQ ID NO: 2150 - DNA, 17 bp, Homo sapiens
tgggccggagtggcgct

SEQ ID NO: 2151 - DNA, 17 bp, Homo sapiens
gggccggagtggcgctg

SEQ ID NO: 2152 - DNA, 17 bp, Homo sapiens
ggccggagtggcgctgg

SEQ ID NO: 2153 - DNA, 17 bp, Homo sapiens
gccggagtggcgctggg

SEQ ID NO: 2154 - DNA, 17 bp, Homo sapiens
ccggagtggcgctggga

SEQ ID NO: 2155 - DNA, 17 bp, Homo sapiens
cggagtggcgctgggaa

SEQ ID NO: 2156 - DNA, 17 bp, Homo sapiens
ggagtggcgctgggaag

SEQ ID NO: 2157 - DNA, 17 bp, Homo sapiens
gagtggcgctgggaaga

SEQ ID NO: 2158 - DNA, 17 bp, Homo sapiens
agtggcgctgggaagac

SEQ ID NO: 2159 - DNA, 17 bp, Homo sapiens
gtggcgctgggaagacc

SEQ ID NO: 2160 - DNA, 17 bp, Homo sapiens
tggcgctgggaagacca

SEQ ID NO: 2161 - DNA, 17 bp, Homo sapiens
ggcgctgggaagaccac

SEQ ID NO: 2162 - DNA, 17 bp, Homo sapiens
gcgctgggaagaccacc

SEQ ID NO: 2163 - DNA, 17 bp, Homo sapiens
cgctgggaagaccacct

SEQ ID NO: 2164 - DNA, 17 bp, Homo sapiens
gctgggaagaccacctg

SEQ ID NO: 2165 - DNA, 17 bp, Homo sapiens
ctgggaagaccacctgc

SEQ ID NO: 2166 - DNA, 17 bp, Homo sapiens
tgggaagaccacctgct

SEQ ID NO: 2167 - DNA, 17 bp, Homo sapiens
gggaagaccacctgctg

SEQ ID NO: 2168 - DNA, 17 bp, Homo sapiens
ggaagaccacctgctgt

SEQ ID NO: 2169 - DNA, 17 bp, Homo sapiens
gaagaccacctgctgtg

SEQ ID NO: 2170 - DNA, 17 bp, Homo sapiens
aagaccacctgctgtga

SEQ ID NO: 2171 - DNA, 17 bp, Homo sapiens
agaccacctgctgtgag

SEQ ID NO: 2172 - DNA, 17 bp, Homo sapiens
gaccacctgctgtgagc

SEQ ID NO: 2173 - DNA, 17 bp, Homo sapiens
accacctgctgtgagca

SEQ ID NO: 2174 - DNA, 17 bp, Homo sapiens
ccacctgctgtgagcag

SEQ ID NO: 2175 - DNA, 17 bp, Homo sapiens
cacctgctgtgagcagg

SEQ ID NO: 2176 - DNA, 17 bp, Homo sapiens
acctgctgtgagcaggt

SEQ ID NO: 2177 - DNA, 17 bp, Homo sapiens
cctgctgtgagcaggtc

SEQ ID NO: 2178 - DNA, 17 bp, Homo sapiens
ctgctgtgagcaggtcc

SEQ ID NO: 2179 - DNA, 17 bp, Homo sapiens
tgctgtgagcaggtcct

SEQ ID NO: 2180 - DNA, 17 bp, Homo sapiens
gctgtgagcaggtcctg

SEQ ID NO: 2181 - DNA, 17 bp, Homo sapiens
ctgtgagcaggtcctgg

SEQ ID NO: 2182 - DNA, 17 bp, Homo sapiens
tgtgagcaggtcctgga

SEQ ID NO: 2183 - DNA, 17 bp, Homo sapiens
gtgagcaggtcctggaa

SEQ ID NO: 2184 - DNA, 17 bp, Homo sapiens
tgagcaggtcctggaac

SEQ ID NO: 2185 - DNA, 17 bp, Homo sapiens
gagcaggtcctggaaca

SEQ ID NO: 2186 - DNA, 17 bp, Homo sapiens
agcaggtcctggaacac

SEQ ID NO: 2187 - DNA, 17 bp, Homo sapiens
gcaggtcctggaacacc

SEQ ID NO: 2188 - DNA, 17 bp, Homo sapiens
caggtcctggaacacct

SEQ ID NO: 2189 - DNA, 17 bp, Homo sapiens
aggtcctggaacacctg

SEQ ID NO: 2190 - DNA, 17 bp, Homo sapiens
ggtcctggaacacctgg

SEQ ID NO: 2191 - DNA, 17 bp, Homo sapiens
gtcctggaacacctggt

SEQ ID NO: 2192 - DNA, 17 bp, Homo sapiens
tcctggaacacctggtg

SEQ ID NO: 2193 - DNA, 17 bp, Homo sapiens
cctggaacacctggtgg

SEQ ID NO: 2194 - DNA, 17 bp, Homo sapiens
ctggaacacctggtggg

SEQ ID NO: 2195 - DNA, 17 bp, Homo sapiens
tggaacacctggtgggg

SEQ ID NO: 2196 - DNA, 17 bp, Homo sapiens
ggaacacctggtgggga

SEQ ID NO: 2197 - DNA, 17 bp, Homo sapiens
gaacacctggtggggat

SEQ ID NO: 2198 - DNA, 17 bp, Homo sapiens
aacacctggtggggatg

SEQ ID NO: 2199 - DNA, 17 bp, Homo sapiens
acacctggtggggatgg

SEQ ID NO: 2200 - DNA, 17 bp, Homo sapiens
cacctggtggggatggc

SEQ ID NO: 2201 - DNA, 17 bp, Homo sapiens
acctggtggggatggca

SEQ ID NO: 2202 - DNA, 17 bp, Homo sapiens
cctggtggggatggcag

SEQ ID NO: 2203 - DNA, 17 bp, Homo sapiens
ctggtggggatggcagg

SEQ ID NO: 2204 - DNA, 17 bp, Homo sapiens
tggtggggatggcaggc

SEQ ID NO: 2205 - DNA, 17 bp, Homo sapiens
ggtggggatggcaggca

SEQ ID NO: 2206 - DNA, 17 bp, Homo sapiens
gtggggatggcaggcag

SEQ ID NO: 2207 - DNA, 17 bp, Homo sapiens
tggggatggcaggcagt

SEQ ID NO: 2208 - DNA, 17 bp, Homo sapiens
ggggatggcaggcagtg

SEQ ID NO: 2209 - DNA, 17 bp, Homo sapiens
gggatggcaggcagtgt

SEQ ID NO: 2210 - DNA, 17 bp, Homo sapiens
ggatggcaggcagtgtg

SEQ ID NO: 2211 - DNA, 17 bp, Homo sapiens
gatggcaggcagtgtgg

SEQ ID NO: 2212 - DNA, 17 bp, Homo sapiens
atggcaggcagtgtgga

SEQ ID NO: 2213 - DNA, 17 bp, Homo sapiens
tggcaggcagtgtggat

SEQ ID NO: 2214 - DNA, 17 bp, Homo sapiens
ggcaggcagtgtggatg

SEQ ID NO: 2215 - DNA, 17 bp, Homo sapiens
gcaggcagtgtggatgg

SEQ ID NO: 2216 - DNA, 17 bp, Homo sapiens
caggcagtgtggatggc

SEQ ID NO: 2217 - DNA, 17 bp, Homo sapiens
aggcagtgtggatggca

SEQ ID NO: 2218 - DNA, 17 bp, Homo sapiens
ggcagtgtggatggcag

SEQ ID NO: 2219 - DNA, 17 bp, Homo sapiens
gcagtgtggatggcagg

SEQ ID NO: 2220 - DNA, 17 bp, Homo sapiens
cagtgtggatggcaggg

SEQ ID NO: 2221 - DNA, 17 bp, Homo sapiens
agtgtggatggcagggt

SEQ ID NO: 2222 - DNA, 17 bp, Homo sapiens
gtgtggatggcagggtc

SEQ ID NO: 2223 - DNA, 17 bp, Homo sapiens
tgtggatggcagggtct

SEQ ID NO: 2224 - DNA, 17 bp, Homo sapiens
gtggatggcagggtctc

SEQ ID NO: 2225 - DNA, 17 bp, Homo sapiens
tggatggcagggtctca

SEQ ID NO: 2226 - DNA, 17 bp, Homo sapiens
ggatggcagggtctcag

SEQ ID NO: 2227 - DNA, 17 bp, Homo sapiens
gatggcagggtctcagt

SEQ ID NO: 2228 - DNA, 17 bp, Homo sapiens
atggcagggtctcagtg

SEQ ID NO: 2229 - DNA, 17 bp, Homo sapiens
tggcagggtctcagtgg

SEQ ID NO: 2230 - DNA, 17 bp, Homo sapiens
ggcagggtctcagtgga

SEQ ID NO: 2231 - DNA, 17 bp, Homo sapiens
gcagggtctcagtggag

SEQ ID NO: 2232 - DNA, 17 bp, Homo sapiens
cagggtctcagtggaga

SEQ ID NO: 2233 - DNA, 17 bp, Homo sapiens
agggtctcagtggagaa

SEQ ID NO: 2234 - DNA, 17 bp, Homo sapiens
gggtctcagtggagaag

SEQ ID NO: 2235 - DNA, 17 bp, Homo sapiens
ggtctcagtggagaaga

SEQ ID NO: 2236 - DNA, 17 bp, Homo sapiens
gtctcagtggagaagat

SEQ ID NO: 2237 - DNA, 17 bp, Homo sapiens
tctcagtggagaagatc

SEQ ID NO: 2238 - DNA, 17 bp, Homo sapiens
ctcagtggagaagatcc

SEQ ID NO: 2239 - DNA, 17 bp, Homo sapiens
tcagtggagaagatccg

SEQ ID NO: 2240 - DNA, 17 bp, Homo sapiens
cagtggagaagatccga

SEQ ID NO: 2241 - DNA, 17 bp, Homo sapiens
agtggagaagatccgag

SEQ ID NO: 2242 - DNA, 17 bp, Homo sapiens
gtggagaagatccgagc

SEQ ID NO: 2243 - DNA, 17 bp, Homo sapiens
tggagaagatccgagcc

SEQ ID NO: 2244 - DNA, 17 bp, Homo sapiens
ggagaagatccgagcca

SEQ ID NO: 2245 - DNA, 17 bp, Homo sapiens
gagaagatccgagccac

SEQ ID NO: 2246 - DNA, 17 bp, Homo sapiens
agaagatccgagccacc

SEQ ID NO: 2247 - DNA, 17 bp, Homo sapiens
gaagatccgagccacct

SEQ ID NO: 2248 - DNA, 17 bp, Homo sapiens
aagatccgagccacctt

SEQ ID NO: 2249 - DNA, 17 bp, Homo sapiens
agatccgagccaccttc

SEQ ID NO: 2250 - DNA, 17 bp, Homo sapiens
gatccgagccaccttca

SEQ ID NO: 2251 - DNA, 17 bp, Homo sapiens
atccgagccaccttcac

SEQ ID NO: 2252 - DNA, 17 bp, Homo sapiens
tccgagccaccttcact

SEQ ID NO: 2253 - DNA, 17 bp, Homo sapiens
ccgagccaccttcactg

SEQ ID NO: 2254 - DNA, 17 bp, Homo sapiens
cgagccaccttcactgt

SEQ ID NO: 2255 - DNA, 17 bp, Homo sapiens
gagccaccttcactgtc

SEQ ID NO: 2256 - DNA, 17 bp, Homo sapiens
agccaccttcactgtcc

SEQ ID NO: 2257 - DNA, 17 bp, Homo sapiens
gccaccttcactgtcct

SEQ ID NO: 2258 - DNA, 17 bp, Homo sapiens
ccaccttcactgtcctc

SEQ ID NO: 2259 - DNA, 17 bp, Homo sapiens
caccttcactgtcctcc

SEQ ID NO: 2260 - DNA, 17 bp, Homo sapiens
accttcactgtcctccg

SEQ ID NO: 2261 - DNA, 17 bp, Homo sapiens
ccttcactgtcctccgg

SEQ ID NO: 2262 - DNA, 17 bp, Homo sapiens
cttcactgtcctccggg

SEQ ID NO: 2263 - DNA, 17 bp, Homo sapiens
ttcactgtcctccgggc

SEQ ID NO: 2264 - DNA, 17 bp, Homo sapiens
tcactgtcctccgggcc

SEQ ID NO: 2265 - DNA, 17 bp, Homo sapiens
cactgtcctccgggcct

SEQ ID NO: 2266 - DNA, 17 bp, Homo sapiens
actgtcctccgggcctt

SEQ ID NO: 2267 - DNA, 17 bp, Homo sapiens
ctgtcctccgggccttc

SEQ ID NO: 2268 - DNA, 17 bp, Homo sapiens
tgtcctccgggccttcg

SEQ ID NO: 2269 - DNA, 17 bp, Homo sapiens
gtcctccgggccttcgg

SEQ ID NO: 2270 - DNA, 17 bp, Homo sapiens
tcctccgggccttcggc

SEQ ID NO: 2271 - DNA, 17 bp, Homo sapiens
cctccgggccttcggct

SEQ ID NO: 2272 - DNA, 17 bp, Homo sapiens
ctccgggccttcggctc

SEQ ID NO: 2273 - DNA, 17 bp, Homo sapiens
tccgggccttcggctct

SEQ ID NO: 2274 - DNA, 17 bp, Homo sapiens
ccgggccttcggctctg

SEQ ID NO: 2275 - DNA, 17 bp, Homo sapiens
cgggccttcggctctgt

SEQ ID NO: 2276 - DNA, 17 bp, Homo sapiens
gggccttcggctctgtg

SEQ ID NO: 2277 - DNA, 17 bp, Homo sapiens
ggccttcggctctgtgt

SEQ ID NO: 2278 - DNA, 17 bp, Homo sapiens
gccttcggctctgtgtc

SEQ ID NO: 2279 - DNA, 17 bp, Homo sapiens
ccttcggctctgtgtcc

SEQ ID NO: 2280 - DNA, 17 bp, Homo sapiens
cttcggctctgtgtcca

SEQ ID NO: 2281 - DNA, 17 bp, Homo sapiens
ttcggctctgtgtccat

SEQ ID NO: 2282 - DNA, 17 bp, Homo sapiens
tcggctctgtgtccatg

SEQ ID NO: 2283 - DNA, 17 bp, Homo sapiens
cggctctgtgtccatgg

SEQ ID NO: 2284 - DNA, 17 bp, Homo sapiens
ggctctgtgtccatggc

SEQ ID NO: 2285 - DNA, 17 bp, Homo sapiens
gctctgtgtccatggcc

SEQ ID NO: 2286 - DNA, 17 bp, Homo sapiens
ctctgtgtccatggccc

SEQ ID NO: 2287 - DNA, 17 bp, Homo sapiens
tctgtgtccatggccca

SEQ ID NO: 2288 - DNA, 17 bp, Homo sapiens
ctgtgtccatggcccac

SEQ ID NO: 2289 - DNA, 17 bp, Homo sapiens
tgtgtccatggcccaca

SEQ ID NO: 2290 - DNA, 17 bp, Homo sapiens
gtgtccatggcccacag

SEQ ID NO: 2291 - DNA, 17 bp, Homo sapiens
tgtccatggcccacagc

SEQ ID NO: 2292 - DNA, 17 bp, Homo sapiens
gtccatggcccacagcc

SEQ ID NO: 2293 - DNA, 17 bp, Homo sapiens
tccatggcccacagccg

SEQ ID NO: 2294 - DNA, 17 bp, Homo sapiens
ccatggcccacagccgc

SEQ ID NO: 2295 - DNA, 17 bp, Homo sapiens
catggcccacagccgca

SEQ ID NO: 2296 - DNA, 17 bp, Homo sapiens
atggcccacagccgcag

SEQ ID NO: 2297 - DNA, 17 bp, Homo sapiens
tggcccacagccgcagt

SEQ ID NO: 2298 - DNA, 17 bp, Homo sapiens
ggcccacagccgcagtg

SEQ ID NO: 2299 - DNA, 17 bp, Homo sapiens
gcccacagccgcagtgc

SEQ ID NO: 2300 - DNA, 17 bp, Homo sapiens
cccacagccgcagtgcc

SEQ ID NO: 2301 - DNA, 17 bp, Homo sapiens
ccacagccgcagtgcca

SEQ ID NO: 2302 - DNA, 17 bp, Homo sapiens
cacagccgcagtgccac

SEQ ID NO: 2303 - DNA, 17 bp, Homo sapiens
acagccgcagtgccacc

SEQ ID NO: 2304 - DNA, 17 bp, Homo sapiens
cagccgcagtgccaccc

SEQ ID NO: 2305 - DNA, 17 bp, Homo sapiens
agccgcagtgccacccg

SEQ ID NO: 2306 - DNA, 17 bp, Homo sapiens
gccgcagtgccacccgg

SEQ ID NO: 2307 - DNA, 17 bp, Homo sapiens
ccgcagtgccacccggt

SEQ ID NO: 2308 - DNA, 17 bp, Homo sapiens
cgcagtgccacccggtt

SEQ ID NO: 2309 - DNA, 17 bp, Homo sapiens
gcagtgccacccggttc

SEQ ID NO: 2310 - DNA, 17 bp, Homo sapiens
cagtgccacccggttct

SEQ ID NO: 2311 - DNA, 17 bp, Homo sapiens
agtgccacccggttctc

SEQ ID NO: 2312 - DNA, 17 bp, Homo sapiens
gtgccacccggttctcc

SEQ ID NO: 2313 - DNA, 17 bp, Homo sapiens
tgccacccggttctcca

SEQ ID NO: 2314 - DNA, 17 bp, Homo sapiens
gccacccggttctccat

SEQ ID NO: 2315 - DNA, 17 bp, Homo sapiens
ccacccggttctccatg

SEQ ID NO: 2316 - DNA, 17 bp, Homo sapiens
cacccggttctccatgg

SEQ ID NO: 2317 - DNA, 17 bp, Homo sapiens
acccggttctccatggt

SEQ ID NO: 2318 - DNA, 17 bp, Homo sapiens
cccggttctccatggtg

SEQ ID NO: 2319 - DNA, 17 bp, Homo sapiens
ccggttctccatggtga

SEQ ID NO: 2320 - DNA, 17 bp, Homo sapiens
cggttctccatggtgat

SEQ ID NO: 2321 - DNA, 17 bp, Homo sapiens
ggttctccatggtgatg

SEQ ID NO: 2322 - DNA, 17 bp, Homo sapiens
gttctccatggtgatgt

SEQ ID NO: 2323 - DNA, 17 bp, Homo sapiens
ttctccatggtgatgtc

SEQ ID NO: 2324 - DNA, 17 bp, Homo sapiens
tctccatggtgatgtcg

SEQ ID NO: 2325 - DNA, 17 bp, Homo sapiens
ctccatggtgatgtcgc

SEQ ID NO: 2326 - DNA, 17 bp, Homo sapiens
tccatggtgatgtcgct

SEQ ID NO: 2327 - DNA, 17 bp, Homo sapiens
ccatggtgatgtcgctg

SEQ ID NO: 2328 - DNA, 17 bp, Homo sapiens
catggtgatgtcgctgg

SEQ ID NO: 2329 - DNA, 17 bp, Homo sapiens
atggtgatgtcgctgga

SEQ ID NO: 2330 - DNA, 17 bp, Homo sapiens
tggtgatgtcgctggac

SEQ ID NO: 2331 - DNA, 17 bp, Homo sapiens
ggtgatgtcgctggact

SEQ ID NO: 2332 - DNA, 17 bp, Homo sapiens
gtgatgtcgctggactt

SEQ ID NO: 2333 - DNA, 17 bp, Homo sapiens
tgatgtcgctggacttc

SEQ ID NO: 2334 - DNA, 17 bp, Homo sapiens
gatgtcgctggacttca

SEQ ID NO: 2335 - DNA, 17 bp, Homo sapiens
atgtcgctggacttcaa

SEQ ID NO: 2336 - DNA, 17 bp, Homo sapiens
tgtcgctggacttcaac

SEQ ID NO: 2337 - DNA, 17 bp, Homo sapiens
gtcgctggacttcaacg

SEQ ID NO: 2338 - DNA, 17 bp, Homo sapiens
tcgctggacttcaacgc

SEQ ID NO: 2339 - DNA, 17 bp, Homo sapiens
cgctggacttcaacgct

SEQ ID NO: 2340 - DNA, 17 bp, Homo sapiens
gctggacttcaacgcta

SEQ ID NO: 2341 - DNA, 17 bp, Homo sapiens
ctggacttcaacgctac

SEQ ID NO: 2342 - DNA, 17 bp, Homo sapiens
tggacttcaacgctaca

SEQ ID NO: 2343 - DNA, 17 bp, Homo sapiens
ggacttcaacgctacag

SEQ ID NO: 2344 - DNA, 17 bp, Homo sapiens
gacttcaacgctacagg

SEQ ID NO: 2345 - DNA, 17 bp, Homo sapiens
acttcaacgctacaggc

SEQ ID NO: 2346 - DNA, 17 bp, Homo sapiens
cttcaacgctacaggcc

SEQ ID NO: 2347 - DNA, 17 bp, Homo sapiens
ttcaacgctacaggccg

SEQ ID NO: 2348 - DNA, 17 bp, Homo sapiens
tcaacgctacaggccgc

SEQ ID NO: 2349 - DNA, 17 bp, Homo sapiens
caacgctacaggccgca

SEQ ID NO: 2350 - DNA, 17 bp, Homo sapiens
aacgctacaggccgcat

SEQ ID NO: 2351 - DNA, 17 bp, Homo sapiens
acgctacaggccgcatc

SEQ ID NO: 2352 - DNA, 17 bp, Homo sapiens
cgctacaggccgcatca

SEQ ID NO: 2353 - DNA, 17 bp, Homo sapiens
gctacaggccgcatcac

SEQ ID NO: 2354 - DNA, 17 bp, Homo sapiens
ctacaggccgcatcaca

SEQ ID NO: 2355 - DNA, 17 bp, Homo sapiens
tacaggccgcatcacag

SEQ ID NO: 2356 - DNA, 17 bp, Homo sapiens
acaggccgcatcacagc

SEQ ID NO: 2357 - DNA, 17 bp, Homo sapiens
caggccgcatcacagct

SEQ ID NO: 2358 - DNA, 17 bp, Homo sapiens
aggccgcatcacagctg

SEQ ID NO: 2359 - DNA, 17 bp, Homo sapiens
ggccgcatcacagctgc

SEQ ID NO: 2360 - DNA, 17 bp, Homo sapiens
gccgcatcacagctgct

SEQ ID NO: 2361 - DNA, 17 bp, Homo sapiens
ccgcatcacagctgctc

SEQ ID NO: 2362 - DNA, 17 bp, Homo sapiens
cgcatcacagctgctca

SEQ ID NO: 2363 - DNA, 17 bp, Homo sapiens
gcatcacagctgctcag

SEQ ID NO: 2364 - DNA, 17 bp, Homo sapiens
catcacagctgctcagc

SEQ ID NO: 2365 - DNA, 17 bp, Homo sapiens
atcacagctgctcagct

SEQ ID NO: 2366 - DNA, 17 bp, Homo sapiens
tcacagctgctcagctc

SEQ ID NO: 2367 - DNA, 17 bp, Homo sapiens
cacagctgctcagctcc

SEQ ID NO: 2368 - DNA, 17 bp, Homo sapiens
acagctgctcagctcca

SEQ ID NO: 2369 - DNA, 17 bp, Homo sapiens
cagctgctcagctccag

SEQ ID NO: 2370 - DNA, 17 bp, Homo sapiens
agctgctcagctccaga

SEQ ID NO: 2371 - DNA, 17 bp, Homo sapiens
gctgctcagctccagac

SEQ ID NO: 2372 - DNA, 17 bp, Homo sapiens
ctgctcagctccagaca

SEQ ID NO: 2373 - DNA, 17 bp, Homo sapiens
tgctcagctccagacaa

SEQ ID NO: 2374 - DNA, 17 bp, Homo sapiens
gctcagctccagacaat

SEQ ID NO: 2375 - DNA, 17 bp, Homo sapiens
ctcagctccagacaatg

SEQ ID NO: 2376 - DNA, 17 bp, Homo sapiens
tcagctccagacaatgc

SEQ ID NO: 2377 - DNA, 17 bp, Homo sapiens
cagctccagacaatgct

SEQ ID NO: 2378 - DNA, 17 bp, Homo sapiens
agctccagacaatgctt

SEQ ID NO: 2379 - DNA, 17 bp, Homo sapiens
gctccagacaatgcttt

SEQ ID NO: 2380 - DNA, 17 bp, Homo sapiens
ctccagacaatgctttt

SEQ ID NO: 2381 - DNA, 17 bp, Homo sapiens
tccagacaatgcttttg

SEQ ID NO: 2382 - DNA, 17 bp, Homo sapiens
ccagacaatgcttttgg

SEQ ID NO: 2383 - DNA, 17 bp, Homo sapiens
cagacaatgcttttgga

SEQ ID NO: 2384 - DNA, 17 bp, Homo sapiens
agacaatgcttttggag

SEQ ID NO: 2385 - DNA, 17 bp, Homo sapiens
gacaatgcttttggaga

SEQ ID NO: 2386 - DNA, 17 bp, Homo sapiens
acaatgcttttggagaa

SEQ ID NO: 2387 - DNA, 17 bp, Homo sapiens
caatgcttttggagaag

SEQ ID NO: 2388 - DNA, 17 bp, Homo sapiens
aatgcttttggagaaga

SEQ ID NO: 2389 - DNA, 17 bp, Homo sapiens
atgcttttggagaagag

SEQ ID NO: 2390 - DNA, 17 bp, Homo sapiens
tgcttttggagaagagc

SEQ ID NO: 2391 - DNA, 17 bp, Homo sapiens
gcttttggagaagagcc

SEQ ID NO: 2392 - DNA, 17 bp, Homo sapiens
cttttggagaagagccg

SEQ ID NO: 2393 - DNA, 17 bp, Homo sapiens
ttttggagaagagccgc

SEQ ID NO: 2394 - DNA, 17 bp, Homo sapiens
tttggagaagagccgcg

SEQ ID NO: 2395 - DNA, 17 bp, Homo sapiens
ttggagaagagccgcgt

SEQ ID NO: 2396 - DNA, 17 bp, Homo sapiens
tggagaagagccgcgtg

SEQ ID NO: 2397 - DNA, 17 bp, Homo sapiens
ggagaagagccgcgtgg

SEQ ID NO: 2398 - DNA, 17 bp, Homo sapiens
gagaagagccgcgtggc

SEQ ID NO: 2399 - DNA, 17 bp, Homo sapiens
agaagagccgcgtggca

SEQ ID NO: 2400 - DNA, 17 bp, Homo sapiens
gaagagccgcgtggcac

SEQ ID NO: 2401 - DNA, 17 bp, Homo sapiens
aagagccgcgtggcacg

SEQ ID NO: 2402 - DNA, 17 bp, Homo sapiens
agagccgcgtggcacgg

SEQ ID NO: 2403 - DNA, 17 bp, Homo sapiens
gagccgcgtggcacggc

SEQ ID NO: 2404 - DNA, 17 bp, Homo sapiens
agccgcgtggcacggca

SEQ ID NO: 2405 - DNA, 17 bp, Homo sapiens
gccgcgtggcacggcag

SEQ ID NO: 2406 - DNA, 17 bp, Homo sapiens
ccgcgtggcacggcagc

SEQ ID NO: 2407 - DNA, 17 bp, Homo sapiens
cgcgtggcacggcagcc

SEQ ID NO: 2408 - DNA, 17 bp, Homo sapiens
gcgtggcacggcagccg

SEQ ID NO: 2409 - DNA, 17 bp, Homo sapiens
cgtggcacggcagccgg

SEQ ID NO: 2410 - DNA, 17 bp, Homo sapiens
gtggcacggcagccgga

SEQ ID NO: 2411 - DNA, 17 bp, Homo sapiens
tggcacggcagccggaa

SEQ ID NO: 2412 - DNA, 17 bp, Homo sapiens
ggcacggcagccggaag

SEQ ID NO: 2413 - DNA, 17 bp, Homo sapiens
gcacggcagccggaagg

SEQ ID NO: 2414 - DNA, 17 bp, Homo sapiens
cacggcagccggaaggg

SEQ ID NO: 2415 - DNA, 17 bp, Homo sapiens
acggcagccggaagggg

SEQ ID NO: 2416 - DNA, 17 bp, Homo sapiens
cggcagccggaagggga

SEQ ID NO: 2417 - DNA, 17 bp, Homo sapiens
ggcagccggaaggggaa

SEQ ID NO: 2418 - DNA, 17 bp, Homo sapiens
gcagccggaaggggaaa

SEQ ID NO: 2419 - DNA, 17 bp, Homo sapiens
cagccggaaggggaaag

SEQ ID NO: 2420 - DNA, 17 bp, Homo sapiens
agccggaaggggaaagt

SEQ ID NO: 2421 - DNA, 17 bp, Homo sapiens
gccggaaggggaaagta

SEQ ID NO: 2422 - DNA, 17 bp, Homo sapiens
ccggaaggggaaagtaa

SEQ ID NO: 2423 - DNA, 17 bp, Homo sapiens
cggaaggggaaagtaac

SEQ ID NO: 2424 - DNA, 17 bp, Homo sapiens
ggaaggggaaagtaact

SEQ ID NO: 2425 - DNA, 17 bp, Homo sapiens
gaaggggaaagtaactt

SEQ ID NO: 2426 - DNA, 17 bp, Homo sapiens
aaggggaaagtaacttc

SEQ ID NO: 2427 - DNA, 17 bp, Homo sapiens
aggggaaagtaacttcc

SEQ ID NO: 2428 - DNA, 17 bp, Homo sapiens
ggggaaagtaacttcct

SEQ ID NO: 2429 - DNA, 17 bp, Homo sapiens
gggaaagtaacttcctg

SEQ ID NO: 2430 - DNA, 17 bp, Homo sapiens
ggaaagtaacttcctgg

SEQ ID NO: 2431 - DNA, 17 bp, Homo sapiens
gaaagtaacttcctggt

SEQ ID NO: 2432 - DNA, 17 bp, Homo sapiens
aaagtaacttcctggtt

SEQ ID NO: 2433 - DNA, 17 bp, Homo sapiens
aagtaacttcctggttt

SEQ ID NO: 2434 - DNA, 17 bp, Homo sapiens
agtaacttcctggtttt

SEQ ID NO: 2435 - DNA, 17 bp, Homo sapiens
gtaacttcctggttttc

SEQ ID NO: 2436 - DNA, 17 bp, Homo sapiens
taacttcctggttttct

SEQ ID NO: 2437 - DNA, 17 bp, Homo sapiens
aacttcctggttttctc

SEQ ID NO: 2438 - DNA, 17 bp, Homo sapiens
acttcctggttttctcc

SEQ ID NO: 2439 - DNA, 17 bp, Homo sapiens
cttcctggttttctccc

SEQ ID NO: 2440 - DNA, 17 bp, Homo sapiens
ttcctggttttctccca

SEQ ID NO: 2441 - DNA, 17 bp, Homo sapiens
tcctggttttctcccag

SEQ ID NO: 2442 - DNA, 17 bp, Homo sapiens
cctggttttctcccaga

SEQ ID NO: 2443 - DNA, 17 bp, Homo sapiens
ctggttttctcccagat

SEQ ID NO: 2444 - DNA, 17 bp, Homo sapiens
tggttttctcccagatg

SEQ ID NO: 2445 - DNA, 17 bp, Homo sapiens
ggttttctcccagatgc

SEQ ID NO: 2446 - DNA, 17 bp, Homo sapiens
gttttctcccagatgct

SEQ ID NO: 2447 - DNA, 17 bp, Homo sapiens
ttttctcccagatgctg

SEQ ID NO: 2448 - DNA, 17 bp, Homo sapiens
tttctcccagatgctgg

SEQ ID NO: 2449 - DNA, 17 bp, Homo sapiens
ttctcccagatgctggc

SEQ ID NO: 2450 - DNA, 17 bp, Homo sapiens
tctcccagatgctggct

SEQ ID NO: 2451 - DNA, 17 bp, Homo sapiens
ctcccagatgctggctg

SEQ ID NO: 2452 - DNA, 17 bp, Homo sapiens
tcccagatgctggctgg

SEQ ID NO: 2453 - DNA, 17 bp, Homo sapiens
cccagatgctggctgga

SEQ ID NO: 2454 - DNA, 17 bp, Homo sapiens
ccagatgctggctggat

SEQ ID NO: 2455 - DNA, 17 bp, Homo sapiens
cagatgctggctggatt

SEQ ID NO: 2456 - DNA, 17 bp, Homo sapiens
agatgctggctggattg

SEQ ID NO: 2457 - DNA, 17 bp, Homo sapiens
gatgctggctggattgg

SEQ ID NO: 2458 - DNA, 17 bp, Homo sapiens
atgctggctggattgga

SEQ ID NO: 2459 - DNA, 17 bp, Homo sapiens
tgctggctggattggac

SEQ ID NO: 2460 - DNA, 17 bp, Homo sapiens
gctggctggattggact

SEQ ID NO: 2461 - DNA, 17 bp, Homo sapiens
ctggctggattggactt

SEQ ID NO: 2462 - DNA, 17 bp, Homo sapiens
tggctggattggacttg

SEQ ID NO: 2463 - DNA, 17 bp, Homo sapiens
ggctggattggacttgg

SEQ ID NO: 2464 - DNA, 17 bp, Homo sapiens
gctggattggacttgga

SEQ ID NO: 2465 - DNA, 17 bp, Homo sapiens
ctggattggacttggat

SEQ ID NO: 2466 - DNA, 17 bp, Homo sapiens
tggattggacttggatc

SEQ ID NO: 2467 - DNA, 17 bp, Homo sapiens
ggattggacttggatct

SEQ ID NO: 2468 - DNA, 17 bp, Homo sapiens
gattggacttggatctc

SEQ ID NO: 2469 - DNA, 17 bp, Homo sapiens
attggacttggatctca

SEQ ID NO: 2470 - DNA, 17 bp, Homo sapiens
ttggacttggatctcag

SEQ ID NO: 2471 - DNA, 17 bp, Homo sapiens
tggacttggatctcagg

SEQ ID NO: 2472 - DNA, 17 bp, Homo sapiens
ggacttggatctcagga

SEQ ID NO: 2473 - DNA, 17 bp, Homo sapiens
gacttggatctcaggac

SEQ ID NO: 2474 - DNA, 17 bp, Homo sapiens
acttggatctcaggacg

SEQ ID NO: 2475 - DNA, 17 bp, Homo sapiens
cttggatctcaggacgg

SEQ ID NO: 2476 - DNA, 17 bp, Homo sapiens
ttggatctcaggacgga

SEQ ID NO: 2477 - DNA, 17 bp, Homo sapiens
tggatctcaggacggag

SEQ ID NO: 2478 - DNA, 17 bp, Homo sapiens
ggatctcaggacggagc

SEQ ID NO: 2479 - DNA, 17 bp, Homo sapiens
gatctcaggacggagct

SEQ ID NO: 2480 - DNA, 17 bp, Homo sapiens
atctcaggacggagctg

SEQ ID NO: 2481 - DNA, 17 bp, Homo sapiens
tctcaggacggagctga

SEQ ID NO: 2482 - DNA, 17 bp, Homo sapiens
ctcaggacggagctgaa

SEQ ID NO: 2483 - DNA, 17 bp, Homo sapiens
tcaggacggagctgaac

SEQ ID NO: 2484 - DNA, 17 bp, Homo sapiens
caggacggagctgaacc

SEQ ID NO: 2485 - DNA, 17 bp, Homo sapiens
aggacggagctgaacct

SEQ ID NO: 2486 - DNA, 17 bp, Homo sapiens
ggacggagctgaacctg

SEQ ID NO: 2487 - DNA, 17 bp, Homo sapiens
gacggagctgaacctgc

SEQ ID NO: 2488 - DNA, 17 bp, Homo sapiens
acggagctgaacctgca

SEQ ID NO: 2489 - DNA, 17 bp, Homo sapiens
cggagctgaacctgcac

SEQ ID NO: 2490 - DNA, 17 bp, Homo sapiens
ggagctgaacctgcacc

SEQ ID NO: 2491 - DNA, 17 bp, Homo sapiens
gagctgaacctgcacca

SEQ ID NO: 2492 - DNA, 17 bp, Homo sapiens
agctgaacctgcaccag

SEQ ID NO: 2493 - DNA, 17 bp, Homo sapiens
gctgaacctgcaccaga

SEQ ID NO: 2494 - DNA, 17 bp, Homo sapiens
ctgaacctgcaccagat

SEQ ID NO: 2495 - DNA, 17 bp, Homo sapiens
tgaacctgcaccagatg

SEQ ID NO: 2496 - DNA, 17 bp, Homo sapiens
gaacctgcaccagatgg

SEQ ID NO: 2497 - DNA, 17 bp, Homo sapiens
aacctgcaccagatggc

SEQ ID NO: 2498 - DNA, 17 bp, Homo sapiens
acctgcaccagatggca

SEQ ID NO: 2499 - DNA, 17 bp, Homo sapiens
cctgcaccagatggcag

SEQ ID NO: 2500 - DNA, 17 bp, Homo sapiens
ctgcaccagatggcaga

SEQ ID NO: 2501 - DNA, 17 bp, Homo sapiens
tgcaccagatggcagat

SEQ ID NO: 2502 - DNA, 17 bp, Homo sapiens
gcaccagatggcagata

SEQ ID NO: 2503 - DNA, 17 bp, Homo sapiens
caccagatggcagatag

SEQ ID NO: 2504 - DNA, 17 bp, Homo sapiens
accagatggcagatagc

SEQ ID NO: 2505 - DNA, 17 bp, Homo sapiens
ccagatggcagatagca

SEQ ID NO: 2506 - DNA, 17 bp, Homo sapiens
cagatggcagatagcag

SEQ ID NO: 2507 - DNA, 17 bp, Homo sapiens
agatggcagatagcagc

SEQ ID NO: 2508 - DNA, 17 bp, Homo sapiens
gatggcagatagcagct

SEQ ID NO: 2509 - DNA, 17 bp, Homo sapiens
atggcagatagcagctc

SEQ ID NO: 2510 - DNA, 17 bp, Homo sapiens
tggcagatagcagctcc

SEQ ID NO: 2511 - DNA, 17 bp, Homo sapiens
ggcagatagcagctcct

SEQ ID NO: 2512 - DNA, 17 bp, Homo sapiens
gcagatagcagctcctt

SEQ ID NO: 2513 - DNA, 17 bp, Homo sapiens
cagatagcagctccttt

SEQ ID NO: 2514 - DNA, 17 bp, Homo sapiens
agatagcagctcctttg

SEQ ID NO: 2515 - DNA, 17 bp, Homo sapiens
gatagcagctcctttgg

SEQ ID NO: 2516 - DNA, 17 bp, Homo sapiens
atagcagctcctttggc

SEQ ID NO: 2517 - DNA, 17 bp, Homo sapiens
tagcagctcctttggca

SEQ ID NO: 2518 - DNA, 17 bp, Homo sapiens
agcagctcctttggcat

SEQ ID NO: 2519 - DNA, 17 bp, Homo sapiens
gcagctcctttggcatg

SEQ ID NO: 2520 - DNA, 17 bp, Homo sapiens
cagctcctttggcatgg

SEQ ID NO: 2521 - DNA, 17 bp, Homo sapiens
agctcctttggcatggg

SEQ ID NO: 2522 - DNA, 17 bp, Homo sapiens
gctcctttggcatgggc

SEQ ID NO: 2523 - DNA, 17 bp, Homo sapiens
ctcctttggcatgggcg

SEQ ID NO: 2524 - DNA, 17 bp, Homo sapiens
tcctttggcatgggcgt

SEQ ID NO: 2525 - DNA, 17 bp, Homo sapiens
cctttggcatgggcgtg

SEQ ID NO: 2526 - DNA, 17 bp, Homo sapiens
ctttggcatgggcgtgt

SEQ ID NO: 2527 - DNA, 17 bp, Homo sapiens
tttggcatgggcgtgtg

SEQ ID NO: 2528 - DNA, 17 bp, Homo sapiens
ttggcatgggcgtgtgg

SEQ ID NO: 2529 - DNA, 17 bp, Homo sapiens
tggcatgggcgtgtggt

SEQ ID NO: 2530 - DNA, 17 bp, Homo sapiens
ggcatgggcgtgtggtc

SEQ ID NO: 2531 - DNA, 17 bp, Homo sapiens
gcatgggcgtgtggtcc

SEQ ID NO: 2532 - DNA, 17 bp, Homo sapiens
catgggcgtgtggtcca

SEQ ID NO: 2533 - DNA, 17 bp, Homo sapiens
atgggcgtgtggtccaa

SEQ ID NO: 2534 - DNA, 17 bp, Homo sapiens
tgggcgtgtggtccaag

SEQ ID NO: 2535 - DNA, 17 bp, Homo sapiens
gggcgtgtggtccaagc

SEQ ID NO: 2536 - DNA, 17 bp, Homo sapiens
ggcgtgtggtccaagcc

SEQ ID NO: 2537 - DNA, 17 bp, Homo sapiens
gcgtgtggtccaagcct

SEQ ID NO: 2538 - DNA, 17 bp, Homo sapiens
cgtgtggtccaagcctg

SEQ ID NO: 2539 - DNA, 17 bp, Homo sapiens
gtgtggtccaagcctga

SEQ ID NO: 2540 - DNA, 17 bp, Homo sapiens
tgtggtccaagcctgaa

SEQ ID NO: 2541 - DNA, 17 bp, Homo sapiens
gtggtccaagcctgaag

SEQ ID NO: 2542 - DNA, 17 bp, Homo sapiens
tggtccaagcctgaaga

SEQ ID NO: 2543 - DNA, 17 bp, Homo sapiens
ggtccaagcctgaagat

SEQ ID NO: 2544 - DNA, 17 bp, Homo sapiens
gtccaagcctgaagata

SEQ ID NO: 2545 - DNA, 17 bp, Homo sapiens
tccaagcctgaagataa

SEQ ID NO: 2546 - DNA, 17 bp, Homo sapiens
ccaagcctgaagataaa

SEQ ID NO: 2547 - DNA, 17 bp, Homo sapiens
caagcctgaagataaac

SEQ ID NO: 2548 - DNA, 17 bp, Homo sapiens
aagcctgaagataaaca

SEQ ID NO: 2549 - DNA, 17 bp, Homo sapiens
agcctgaagataaacag

SEQ ID NO: 2550 - DNA, 17 bp, Homo sapiens
gcctgaagataaacaga

SEQ ID NO: 2551 - DNA, 17 bp, Homo sapiens
cctgaagataaacagaa

SEQ ID NO: 2552 - DNA, 17 bp, Homo sapiens
ctgaagataaacagaag

SEQ ID NO: 2553 - DNA, 17 bp, Homo sapiens
tgaagataaacagaagg

SEQ ID NO: 2554 - DNA, 17 bp, Homo sapiens
gaagataaacagaaggc

SEQ ID NO: 2555 - DNA, 17 bp, Homo sapiens
aagataaacagaaggcg

SEQ ID NO: 2556 - DNA, 17 bp, Homo sapiens
agataaacagaaggcgg

SEQ ID NO: 2557 - DNA, 17 bp, Homo sapiens
gataaacagaaggcggc

SEQ ID NO: 2558 - DNA, 17 bp, Homo sapiens
ataaacagaaggcggca

SEQ ID NO: 2559 - DNA, 17 bp, Homo sapiens
taaacagaaggcggcag

SEQ ID NO: 2560 - DNA, 17 bp, Homo sapiens
aaacagaaggcggcagc

SEQ ID NO: 2561 - DNA, 17 bp, Homo sapiens
aacagaaggcggcagct

SEQ ID NO: 2562 - DNA, 17 bp, Homo sapiens
acagaaggcggcagctg

SEQ ID NO: 2563 - DNA, 17 bp, Homo sapiens
cagaaggcggcagctgc

SEQ ID NO: 2564 - DNA, 17 bp, Homo sapiens
agaaggcggcagctgcc

SEQ ID NO: 2565 - DNA, 17 bp, Homo sapiens
gaaggcggcagctgcct

SEQ ID NO: 2566 - DNA, 17 bp, Homo sapiens
aaggcggcagctgcctt

SEQ ID NO: 2567 - DNA, 17 bp, Homo sapiens
aggcggcagctgccttt

SEQ ID NO: 2568 - DNA, 17 bp, Homo sapiens
ggcggcagctgcctttg

SEQ ID NO: 2569 - DNA, 17 bp, Homo sapiens
gcggcagctgcctttgc

SEQ ID NO: 2570 - DNA, 17 bp, Homo sapiens
cggcagctgcctttgcc

SEQ ID NO: 2571 - DNA, 17 bp, Homo sapiens
ggcagctgcctttgccc

SEQ ID NO: 2572 - DNA, 17 bp, Homo sapiens
gcagctgcctttgccca

SEQ ID NO: 2573 - DNA, 17 bp, Homo sapiens
cagctgcctttgcccag

SEQ ID NO: 2574 - DNA, 17 bp, Homo sapiens
agctgcctttgcccagc

SEQ ID NO: 2575 - DNA, 17 bp, Homo sapiens
gctgcctttgcccagct

SEQ ID NO: 2576 - DNA, 17 bp, Homo sapiens
ctgcctttgcccagctc

SEQ ID NO: 2577 - DNA, 17 bp, Homo sapiens
tgcctttgcccagctcc

SEQ ID NO: 2578 - DNA, 17 bp, Homo sapiens
gcctttgcccagctcca

SEQ ID NO: 2579 - DNA, 17 bp, Homo sapiens
cctttgcccagctccag

SEQ ID NO: 2580 - DNA, 17 bp, Homo sapiens
ctttgcccagctccagg

SEQ ID NO: 2581 - DNA, 17 bp, Homo sapiens
tttgcccagctccaggg

SEQ ID NO: 2582 - DNA, 17 bp, Homo sapiens
ttgcccagctccagggt

SEQ ID NO: 2583 - DNA, 17 bp, Homo sapiens
tgcccagctccagggtg

SEQ ID NO: 2584 - DNA, 17 bp, Homo sapiens
gcccagctccagggtgc

SEQ ID NO: 2585 - DNA, 17 bp, Homo sapiens
cccagctccagggtgcc

SEQ ID NO: 2586 - DNA, 17 bp, Homo sapiens
ccagctccagggtgcca

SEQ ID NO: 2587 - DNA, 17 bp, Homo sapiens
cagctccagggtgccat

SEQ ID NO: 2588 - DNA, 17 bp, Homo sapiens
agctccagggtgccatg

SEQ ID NO: 2589 - DNA, 17 bp, Homo sapiens
gctccagggtgccatgg

SEQ ID NO: 2590 - DNA, 17 bp, Homo sapiens
ctccagggtgccatgga

SEQ ID NO: 2591 - DNA, 17 bp, Homo sapiens
tccagggtgccatggag

SEQ ID NO: 2592 - DNA, 17 bp, Homo sapiens
ccagggtgccatggaga

SEQ ID NO: 2593 - DNA, 17 bp, Homo sapiens
cagggtgccatggagat

SEQ ID NO: 2594 - DNA, 17 bp, Homo sapiens
agggtgccatggagatg

SEQ ID NO: 2595 - DNA, 17 bp, Homo sapiens
gggtgccatggagatgc

SEQ ID NO: 2596 - DNA, 17 bp, Homo sapiens
ggtgccatggagatgct

SEQ ID NO: 2597 - DNA, 17 bp, Homo sapiens
gtgccatggagatgctg

SEQ ID NO: 2598 - DNA, 17 bp, Homo sapiens
tgccatggagatgctgg

SEQ ID NO: 2599 - DNA, 17 bp, Homo sapiens
gccatggagatgctggg

SEQ ID NO: 2600 - DNA, 17 bp, Homo sapiens
ccatggagatgctgggc

SEQ ID NO: 2601 - DNA, 17 bp, Homo sapiens
catggagatgctgggca

SEQ ID NO: 2602 - DNA, 17 bp, Homo sapiens
atggagatgctgggcat

SEQ ID NO: 2603 - DNA, 17 bp, Homo sapiens
tggagatgctgggcatc

SEQ ID NO: 2604 - DNA, 17 bp, Homo sapiens
ggagatgctgggcatct

SEQ ID NO: 2605 - DNA, 17 bp, Homo sapiens
gagatgctgggcatctc

SEQ ID NO: 2606 - DNA, 17 bp, Homo sapiens
agatgctgggcatctca

SEQ ID NO: 2607 - DNA, 17 bp, Homo sapiens
gatgctgggcatctcag

SEQ ID NO: 2608 - DNA, 17 bp, Homo sapiens
atgctgggcatctcaga

SEQ ID NO: 2609 - DNA, 17 bp, Homo sapiens
tgctgggcatctcagag

SEQ ID NO: 2610 - DNA, 17 bp, Homo sapiens
gctgggcatctcagaga

SEQ ID NO: 2611 - DNA, 17 bp, Homo sapiens
ctgggcatctcagagag

SEQ ID NO: 2612 - DNA, 17 bp, Homo sapiens
tgggcatctcagagagc

SEQ ID NO: 2613 - DNA, 17 bp, Homo sapiens
gggcatctcagagagcg

SEQ ID NO: 2614 - DNA, 17 bp, Homo sapiens
ggcatctcagagagcga

SEQ ID NO: 2615 - DNA, 17 bp, Homo sapiens
gcatctcagagagcgag

SEQ ID NO: 2616 - DNA, 17 bp, Homo sapiens
catctcagagagcgagc

SEQ ID NO: 2617 - DNA, 17 bp, Homo sapiens
atctcagagagcgagca

SEQ ID NO: 2618 - DNA, 17 bp, Homo sapiens
tctcagagagcgagcag

SEQ ID NO: 2619 - DNA, 17 bp, Homo sapiens
ctcagagagcgagcagc

SEQ ID NO: 2620 - DNA, 17 bp, Homo sapiens
tcagagagcgagcagcg

SEQ ID NO: 2621 - DNA, 17 bp, Homo sapiens
cagagagcgagcagcgg

SEQ ID NO: 2622 - DNA, 17 bp, Homo sapiens
agagagcgagcagcggg

SEQ ID NO: 2623 - DNA, 17 bp, Homo sapiens
gagagcgagcagcgggc

SEQ ID NO: 2624 - DNA, 17 bp, Homo sapiens
agagcgagcagcgggct

SEQ ID NO: 2625 - DNA, 17 bp, Homo sapiens
gagcgagcagcgggctg

SEQ ID NO: 2626 - DNA, 17 bp, Homo sapiens
agcgagcagcgggctgt

SEQ ID NO: 2627 - DNA, 17 bp, Homo sapiens
gcgagcagcgggctgtt

SEQ ID NO: 2628 - DNA, 17 bp, Homo sapiens
cgagcagcgggctgttt

SEQ ID NO: 2629 - DNA, 17 bp, Homo sapiens
gagcagcgggctgtttg

SEQ ID NO: 2630 - DNA, 17 bp, Homo sapiens
agcagcgggctgtttgg

SEQ ID NO: 2631 - DNA, 17 bp, Homo sapiens
gcagcgggctgtttggc

SEQ ID NO: 2632 - DNA, 17 bp, Homo sapiens
cagcgggctgtttggcg

SEQ ID NO: 2633 - DNA, 17 bp, Homo sapiens
agcgggctgtttggcgg

SEQ ID NO: 2634 - DNA, 17 bp, Homo sapiens
gcgggctgtttggcggg

SEQ ID NO: 2635 - DNA, 17 bp, Homo sapiens
cgggctgtttggcgggt

SEQ ID NO: 2636 - DNA, 17 bp, Homo sapiens
gggctgtttggcgggtc

SEQ ID NO: 2637 - DNA, 17 bp, Homo sapiens
ggctgtttggcgggtcc

SEQ ID NO: 2638 - DNA, 17 bp, Homo sapiens
gctgtttggcgggtcct

SEQ ID NO: 2639 - DNA, 17 bp, Homo sapiens
ctgtttggcgggtcctg

SEQ ID NO: 2640 - DNA, 17 bp, Homo sapiens
tgtttggcgggtcctgg

SEQ ID NO: 2641 - DNA, 17 bp, Homo sapiens
gtttggcgggtcctggc

SEQ ID NO: 2642 - DNA, 17 bp, Homo sapiens
tttggcgggtcctggca

SEQ ID NO: 2643 - DNA, 17 bp, Homo sapiens
ttggcgggtcctggcag

SEQ ID NO: 2644 - DNA, 17 bp, Homo sapiens
tggcgggtcctggcagc

SEQ ID NO: 2645 - DNA, 17 bp, Homo sapiens
ggcgggtcctggcagcc

SEQ ID NO: 2646 - DNA, 17 bp, Homo sapiens
gcgggtcctggcagcca

SEQ ID NO: 2647 - DNA, 17 bp, Homo sapiens
cgggtcctggcagccat

SEQ ID NO: 2648 - DNA, 17 bp, Homo sapiens
gggtcctggcagccatc

SEQ ID NO: 2649 - DNA, 17 bp, Homo sapiens
ggtcctggcagccatct

SEQ ID NO: 2650 - DNA, 17 bp, Homo sapiens
gtcctggcagccatcta

SEQ ID NO: 2651 - DNA, 17 bp, Homo sapiens
tcctggcagccatctac

SEQ ID NO: 2652 - DNA, 17 bp, Homo sapiens
cctggcagccatctacc

SEQ ID NO: 2653 - DNA, 17 bp, Homo sapiens
ctggcagccatctacca

SEQ ID NO: 2654 - DNA, 17 bp, Homo sapiens
tggcagccatctaccac

SEQ ID NO: 2655 - DNA, 17 bp, Homo sapiens
ggcagccatctaccacc

SEQ ID NO: 2656 - DNA, 17 bp, Homo sapiens
gcagccatctaccacct

SEQ ID NO: 2657 - DNA, 17 bp, Homo sapiens
cagccatctaccacctg

SEQ ID NO: 2658 - DNA, 17 bp, Homo sapiens
agccatctaccacctgg

SEQ ID NO: 2659 - DNA, 17 bp, Homo sapiens
gccatctaccacctggg

SEQ ID NO: 2660 - DNA, 17 bp, Homo sapiens
ccatctaccacctgggc

SEQ ID NO: 2661 - DNA, 17 bp, Homo sapiens
catctaccacctgggcg

SEQ ID NO: 2662 - DNA, 17 bp, Homo sapiens
atctaccacctgggcgc

SEQ ID NO: 2663 - DNA, 17 bp, Homo sapiens
tctaccacctgggcgcg

SEQ ID NO: 2664 - DNA, 17 bp, Homo sapiens
ctaccacctgggcgcgg

SEQ ID NO: 2665 - DNA, 17 bp, Homo sapiens
taccacctgggcgcggc

SEQ ID NO: 2666 - DNA, 17 bp, Homo sapiens
accacctgggcgcggcg

SEQ ID NO: 2667 - DNA, 17 bp, Homo sapiens
ccacctgggcgcggcgg

SEQ ID NO: 2668 - DNA, 17 bp, Homo sapiens
cacctgggcgcggcggg

SEQ ID NO: 2669 - DNA, 17 bp, Homo sapiens
acctgggcgcggcgggg

SEQ ID NO: 2670 - DNA, 17 bp, Homo sapiens
cctgggcgcggcggggg

SEQ ID NO: 2671 - DNA, 17 bp, Homo sapiens
ctgggcgcggcgggggc

SEQ ID NO: 2672 - DNA, 17 bp, Homo sapiens
tgggcgcggcgggggcc

SEQ ID NO: 2673 - DNA, 17 bp, Homo sapiens
gggcgcggcgggggcct

SEQ ID NO: 2674 - DNA, 17 bp, Homo sapiens
ggcgcggcgggggcctg

SEQ ID NO: 2675 - DNA, 17 bp, Homo sapiens
gcgcggcgggggcctgc

SEQ ID NO: 2676 - DNA, 17 bp, Homo sapiens
cgcggcgggggcctgca

SEQ ID NO: 2677 - DNA, 17 bp, Homo sapiens
gcggcgggggcctgcaa

SEQ ID NO: 2678 - DNA, 17 bp, Homo sapiens
cggcgggggcctgcaaa

SEQ ID NO: 2679 - DNA, 17 bp, Homo sapiens
ggcgggggcctgcaaag

SEQ ID NO: 2680 - DNA, 17 bp, Homo sapiens
gcgggggcctgcaaagt

SEQ ID NO: 2681 - DNA, 17 bp, Homo sapiens
cgggggcctgcaaagtg

SEQ ID NO: 2682 - DNA, 17 bp, Homo sapiens
gggggcctgcaaagtgg

SEQ ID NO: 2683 - DNA, 17 bp, Homo sapiens
ggggcctgcaaagtggg

SEQ ID NO: 2684 - DNA, 17 bp, Homo sapiens
gggcctgcaaagtgggt

SEQ ID NO: 2685 - DNA, 17 bp, Homo sapiens
ggcctgcaaagtgggtc

SEQ ID NO: 2686 - DNA, 17 bp, Homo sapiens
gcctgcaaagtgggtcg

SEQ ID NO: 2687 - DNA, 17 bp, Homo sapiens
cctgcaaagtgggtcgg

SEQ ID NO: 2688 - DNA, 17 bp, Homo sapiens
ctgcaaagtgggtcgga

SEQ ID NO: 2689 - DNA, 17 bp, Homo sapiens
tgcaaagtgggtcggaa

SEQ ID NO: 2690 - DNA, 17 bp, Homo sapiens
gcaaagtgggtcggaag

SEQ ID NO: 2691 - DNA, 17 bp, Homo sapiens
caaagtgggtcggaagc

SEQ ID NO: 2692 - DNA, 17 bp, Homo sapiens
aaagtgggtcggaagca

SEQ ID NO: 2693 - DNA, 17 bp, Homo sapiens
aagtgggtcggaagcag

SEQ ID NO: 2694 - DNA, 17 bp, Homo sapiens
agtgggtcggaagcagt

SEQ ID NO: 2695 - DNA, 17 bp, Homo sapiens
gtgggtcggaagcagtt

SEQ ID NO: 2696 - DNA, 17 bp, Homo sapiens
tgggtcggaagcagttc

SEQ ID NO: 2697 - DNA, 17 bp, Homo sapiens
gggtcggaagcagttca

SEQ ID NO: 2698 - DNA, 17 bp, Homo sapiens
ggtcggaagcagttcat

SEQ ID NO: 2699 - DNA, 17 bp, Homo sapiens
gtcggaagcagttcatg

SEQ ID NO: 2700 - DNA, 17 bp, Homo sapiens
tcggaagcagttcatga

SEQ ID NO: 2701 - DNA, 17 bp, Homo sapiens
cggaagcagttcatgag

SEQ ID NO: 2702 - DNA, 17 bp, Homo sapiens
ggaagcagttcatgagg

SEQ ID NO: 2703 - DNA, 17 bp, Homo sapiens
gaagcagttcatgaggt

SEQ ID NO: 2704 - DNA, 17 bp, Homo sapiens
aagcagttcatgaggtt

SEQ ID NO: 2705 - DNA, 17 bp, Homo sapiens
agcagttcatgaggttt

SEQ ID NO: 2706 - DNA, 17 bp, Homo sapiens
gcagttcatgaggtttg

SEQ ID NO: 2707 - DNA, 17 bp, Homo sapiens
cagttcatgaggtttga

SEQ ID NO: 2708 - DNA, 17 bp, Homo sapiens
agttcatgaggtttgag

SEQ ID NO: 2709 - DNA, 17 bp, Homo sapiens
gttcatgaggtttgagt

SEQ ID NO: 2710 - DNA, 17 bp, Homo sapiens
ttcatgaggtttgagtg

SEQ ID NO: 2711 - DNA, 17 bp, Homo sapiens
tcatgaggtttgagtgg

SEQ ID NO: 2712 - DNA, 17 bp, Homo sapiens
catgaggtttgagtggg

SEQ ID NO: 2713 - DNA, 17 bp, Homo sapiens
atgaggtttgagtgggc

SEQ ID NO: 2714 - DNA, 17 bp, Homo sapiens
tgaggtttgagtgggca

SEQ ID NO: 2715 - DNA, 17 bp, Homo sapiens
gaggtttgagtgggcaa

SEQ ID NO: 2716 - DNA, 17 bp, Homo sapiens
aggtttgagtgggcaaa

SEQ ID NO: 2717 - DNA, 17 bp, Homo sapiens
ggtttgagtgggcaaac

SEQ ID NO: 2718 - DNA, 17 bp, Homo sapiens
gtttgagtgggcaaact

SEQ ID NO: 2719 - DNA, 17 bp, Homo sapiens
tttgagtgggcaaacta

SEQ ID NO: 2720 - DNA, 17 bp, Homo sapiens
ttgagtgggcaaactac

SEQ ID NO: 2721 - DNA, 17 bp, Homo sapiens
tgagtgggcaaactacg

SEQ ID NO: 2722 - DNA, 17 bp, Homo sapiens
gagtgggcaaactacgc

SEQ ID NO: 2723 - DNA, 17 bp, Homo sapiens
agtgggcaaactacgca

SEQ ID NO: 2724 - DNA, 17 bp, Homo sapiens
gtgggcaaactacgcag

SEQ ID NO: 2725 - DNA, 17 bp, Homo sapiens
tgggcaaactacgcagc

SEQ ID NO: 2726 - DNA, 17 bp, Homo sapiens
gggcaaactacgcagct

SEQ ID NO: 2727 - DNA, 17 bp, Homo sapiens
ggcaaactacgcagctg

SEQ ID NO: 2728 - DNA, 17 bp, Homo sapiens
gcaaactacgcagctga

SEQ ID NO: 2729 - DNA, 17 bp, Homo sapiens
caaactacgcagctgag

SEQ ID NO: 2730 - DNA, 17 bp, Homo sapiens
aaactacgcagctgagg

SEQ ID NO: 2731 - DNA, 17 bp, Homo sapiens
aactacgcagctgaggc

SEQ ID NO: 2732 - DNA, 17 bp, Homo sapiens
actacgcagctgaggcc

SEQ ID NO: 2733 - DNA, 17 bp, Homo sapiens
ctacgcagctgaggccc

SEQ ID NO: 2734 - DNA, 17 bp, Homo sapiens
tacgcagctgaggccct

SEQ ID NO: 2735 - DNA, 17 bp, Homo sapiens
acgcagctgaggccctg

SEQ ID NO: 2736 - DNA, 17 bp, Homo sapiens
cgcagctgaggccctgg

SEQ ID NO: 2737 - DNA, 17 bp, Homo sapiens
gcagctgaggccctggg

SEQ ID NO: 2738 - DNA, 17 bp, Homo sapiens
cagctgaggccctgggc

SEQ ID NO: 2739 - DNA, 17 bp, Homo sapiens
agctgaggccctgggct

SEQ ID NO: 2740 - DNA, 17 bp, Homo sapiens
gctgaggccctgggctg

SEQ ID NO: 2741 - DNA, 17 bp, Homo sapiens
ctgaggccctgggctgc

SEQ ID NO: 2742 - DNA, 17 bp, Homo sapiens
tgaggccctgggctgcg

SEQ ID NO: 2743 - DNA, 17 bp, Homo sapiens
gaggccctgggctgcga

SEQ ID NO: 2744 - DNA, 17 bp, Homo sapiens
aggccctgggctgcgag

SEQ ID NO: 2745 - DNA, 17 bp, Homo sapiens
ggccctgggctgcgagt

SEQ ID NO: 2746 - DNA, 17 bp, Homo sapiens
gccctgggctgcgagta

SEQ ID NO: 2747 - DNA, 17 bp, Homo sapiens
ccctgggctgcgagtat

SEQ ID NO: 2748 - DNA, 17 bp, Homo sapiens
cctgggctgcgagtatg

SEQ ID NO: 2749 - DNA, 17 bp, Homo sapiens
ctgggctgcgagtatga

SEQ ID NO: 2750 - DNA, 17 bp, Homo sapiens
tgggctgcgagtatgag

SEQ ID NO: 2751 - DNA, 17 bp, Homo sapiens
gggctgcgagtatgagg

SEQ ID NO: 2752 - DNA, 17 bp, Homo sapiens
ggctgcgagtatgagga

SEQ ID NO: 2753 - DNA, 17 bp, Homo sapiens
gctgcgagtatgaggag

SEQ ID NO: 2754 - DNA, 17 bp, Homo sapiens
ctgcgagtatgaggagc

SEQ ID NO: 2755 - DNA, 17 bp, Homo sapiens
tgcgagtatgaggagct

SEQ ID NO: 2756 - DNA, 17 bp, Homo sapiens
gcgagtatgaggagctg

SEQ ID NO: 2757 - DNA, 17 bp, Homo sapiens
cgagtatgaggagctga

SEQ ID NO: 2758 - DNA, 17 bp, Homo sapiens
gagtatgaggagctgaa

SEQ ID NO: 2759 - DNA, 17 bp, Homo sapiens
agtatgaggagctgaac

SEQ ID NO: 2760 - DNA, 17 bp, Homo sapiens
gtatgaggagctgaaca

SEQ ID NO: 2761 - DNA, 17 bp, Homo sapiens
tatgaggagctgaacac

SEQ ID NO: 2762 - DNA, 17 bp, Homo sapiens
atgaggagctgaacacg

SEQ ID NO: 2763 - DNA, 17 bp, Homo sapiens
tgaggagctgaacacgg

SEQ ID NO: 2764 - DNA, 17 bp, Homo sapiens
gaggagctgaacacggc

SEQ ID NO: 2765 - DNA, 17 bp, Homo sapiens
aggagctgaacacggcc

SEQ ID NO: 2766 - DNA, 17 bp, Homo sapiens
ggagctgaacacggcca

SEQ ID NO: 2767 - DNA, 17 bp, Homo sapiens
gagctgaacacggccac

SEQ ID NO: 2768 - DNA, 17 bp, Homo sapiens
agctgaacacggccacc

SEQ ID NO: 2769 - DNA, 17 bp, Homo sapiens
gctgaacacggccacct

SEQ ID NO: 2770 - DNA, 17 bp, Homo sapiens
ctgaacacggccacctt

SEQ ID NO: 2771 - DNA, 17 bp, Homo sapiens
tgaacacggccaccttc

SEQ ID NO: 2772 - DNA, 17 bp, Homo sapiens
gaacacggccaccttca

SEQ ID NO: 2773 - DNA, 17 bp, Homo sapiens
aacacggccaccttcaa

SEQ ID NO: 2774 - DNA, 17 bp, Homo sapiens
acacggccaccttcaag

SEQ ID NO: 2775 - DNA, 17 bp, Homo sapiens
cacggccaccttcaagc

SEQ ID NO: 2776 - DNA, 17 bp, Homo sapiens
acggccaccttcaagca

SEQ ID NO: 2777 - DNA, 17 bp, Homo sapiens
cggccaccttcaagcac

SEQ ID NO: 2778 - DNA, 17 bp, Homo sapiens
ggccaccttcaagcacc

SEQ ID NO: 2779 - DNA, 17 bp, Homo sapiens
gccaccttcaagcacca

SEQ ID NO: 2780 - DNA, 17 bp, Homo sapiens
ccaccttcaagcaccac

SEQ ID NO: 2781 - DNA, 17 bp, Homo sapiens
caccttcaagcaccacc

SEQ ID NO: 2782 - DNA, 17 bp, Homo sapiens
accttcaagcaccacct

SEQ ID NO: 2783 - DNA, 17 bp, Homo sapiens
ccttcaagcaccacctt

SEQ ID NO: 2784 - DNA, 17 bp, Homo sapiens
cttcaagcaccaccttc

SEQ ID NO: 2785 - DNA, 17 bp, Homo sapiens
ttcaagcaccaccttcg

SEQ ID NO: 2786 - DNA, 17 bp, Homo sapiens
tcaagcaccaccttcga

SEQ ID NO: 2787 - DNA, 17 bp, Homo sapiens
caagcaccaccttcgac

SEQ ID NO: 2788 - DNA, 17 bp, Homo sapiens
aagcaccaccttcgaca

SEQ ID NO: 2789 - DNA, 17 bp, Homo sapiens
agcaccaccttcgacag

SEQ ID NO: 2790 - DNA, 17 bp, Homo sapiens
gcaccaccttcgacaga

SEQ ID NO: 2791 - DNA, 17 bp, Homo sapiens
caccaccttcgacagat

SEQ ID NO: 2792 - DNA, 17 bp, Homo sapiens
accaccttcgacagatc

SEQ ID NO: 2793 - DNA, 17 bp, Homo sapiens
ccaccttcgacagatca

SEQ ID NO: 2794 - DNA, 17 bp, Homo sapiens
caccttcgacagatcat

SEQ ID NO: 2795 - DNA, 17 bp, Homo sapiens
accttcgacagatcatc

SEQ ID NO: 2796 - DNA, 17 bp, Homo sapiens
ccttcgacagatcatcc

SEQ ID NO: 2797 - DNA, 17 bp, Homo sapiens
cttcgacagatcatcca

SEQ ID NO: 2798 - DNA, 17 bp, Homo sapiens
ttcgacagatcatccag

SEQ ID NO: 2799 - DNA, 17 bp, Homo sapiens
tcgacagatcatccagc

SEQ ID NO: 2800 - DNA, 17 bp, Homo sapiens
cgacagatcatccagca

SEQ ID NO: 2801 - DNA, 17 bp, Homo sapiens
gacagatcatccagcaa

SEQ ID NO: 2802 - DNA, 17 bp, Homo sapiens
acagatcatccagcaaa

SEQ ID NO: 2803 - DNA, 17 bp, Homo sapiens
cagatcatccagcaaat

SEQ ID NO: 2804 - DNA, 17 bp, Homo sapiens
agatcatccagcaaatg

SEQ ID NO: 2805 - DNA, 17 bp, Homo sapiens
gatcatccagcaaatga

SEQ ID NO: 2806 - DNA, 17 bp, Homo sapiens
atcatccagcaaatgac

SEQ ID NO: 2807 - DNA, 17 bp, Homo sapiens
tcatccagcaaatgacg

SEQ ID NO: 2808 - DNA, 17 bp, Homo sapiens
catccagcaaatgacgt

SEQ ID NO: 2809 - DNA, 17 bp, Homo sapiens
atccagcaaatgacgtt

SEQ ID NO: 2810 - DNA, 17 bp, Homo sapiens
tccagcaaatgacgttt

SEQ ID NO: 2811 - DNA, 17 bp, Homo sapiens
ccagcaaatgacgtttg

SEQ ID NO: 2812 - DNA, 17 bp, Homo sapiens
cagcaaatgacgtttgg

SEQ ID NO: 2813 - DNA, 17 bp, Homo sapiens
agcaaatgacgtttggg

SEQ ID NO: 2814 - DNA, 17 bp, Homo sapiens
gcaaatgacgtttgggc

SEQ ID NO: 2815 - DNA, 17 bp, Homo sapiens
caaatgacgtttgggcc

SEQ ID NO: 2816 - DNA, 17 bp, Homo sapiens
aaatgacgtttgggcca

SEQ ID NO: 2817 - DNA, 17 bp, Homo sapiens
aatgacgtttgggccaa

SEQ ID NO: 2818 - DNA, 17 bp, Homo sapiens
atgacgtttgggccaag

SEQ ID NO: 2819 - DNA, 17 bp, Homo sapiens
tgacgtttgggccaagc

SEQ ID NO: 2820 - DNA, 17 bp, Homo sapiens
gacgtttgggccaagcc

SEQ ID NO: 2821 - DNA, 17 bp, Homo sapiens
acgtttgggccaagccg

SEQ ID NO: 2822 - DNA, 17 bp, Homo sapiens
cgtttgggccaagccga

SEQ ID NO: 2823 - DNA, 17 bp, Homo sapiens
gtttgggccaagccgat

SEQ ID NO: 2824 - DNA, 17 bp, Homo sapiens
tttgggccaagccgatg

SEQ ID NO: 2825 - DNA, 17 bp, Homo sapiens
ttgggccaagccgatgg

SEQ ID NO: 2826 - DNA, 17 bp, Homo sapiens
tgggccaagccgatggg

SEQ ID NO: 2827 - DNA, 17 bp, Homo sapiens
gggccaagccgatgggg

SEQ ID NO: 2828 - DNA, 17 bp, Homo sapiens
ggccaagccgatggggc

SEQ ID NO: 2829 - DNA, 17 bp, Homo sapiens
gccaagccgatggggcc

SEQ ID NO: 2830 - DNA, 17 bp, Homo sapiens
ccaagccgatggggcct

SEQ ID NO: 2831 - DNA, 17 bp, Homo sapiens
caagccgatggggcctc

SEQ ID NO: 2832 - DNA, 17 bp, Homo sapiens
aagccgatggggcctcg

SEQ ID NO: 2833 - DNA, 17 bp, Homo sapiens
agccgatggggcctcga

SEQ ID NO: 2834 - DNA, 17 bp, Homo sapiens
gccgatggggcctcgag

SEQ ID NO: 2835 - DNA, 17 bp, Homo sapiens
ccgatggggcctcgagg

SEQ ID NO: 2836 - DNA, 17 bp, Homo sapiens
cgatggggcctcgagga

SEQ ID NO: 2837 - DNA, 17 bp, Homo sapiens
gatggggcctcgaggat

SEQ ID NO: 2838 - DNA, 17 bp, Homo sapiens
atggggcctcgaggatg

SEQ ID NO: 2839 - DNA, 17 bp, Homo sapiens
tggggcctcgaggatga

SEQ ID NO: 2840 - DNA, 17 bp, Homo sapiens
ggggcctcgaggatgag

SEQ ID NO: 2841 - DNA, 17 bp, Homo sapiens
gggcctcgaggatgagg

SEQ ID NO: 2842 - DNA, 17 bp, Homo sapiens
ggcctcgaggatgagga

SEQ ID NO: 2843 - DNA, 17 bp, Homo sapiens
gcctcgaggatgaggaa

SEQ ID NO: 2844 - DNA, 17 bp, Homo sapiens
cctcgaggatgaggaaa

SEQ ID NO: 2845 - DNA, 17 bp, Homo sapiens
ctcgaggatgaggaaac

SEQ ID NO: 2846 - DNA, 17 bp, Homo sapiens
tcgaggatgaggaaacc

SEQ ID NO: 2847 - DNA, 17 bp, Homo sapiens
cgaggatgaggaaacca

SEQ ID NO: 2848 - DNA, 17 bp, Homo sapiens
gaggatgaggaaaccag

SEQ ID NO: 2849 - DNA, 17 bp, Homo sapiens
aggatgaggaaaccagc

SEQ ID NO: 2850 - DNA, 17 bp, Homo sapiens
ggatgaggaaaccagct

SEQ ID NO: 2851 - DNA, 17 bp, Homo sapiens
gatgaggaaaccagctc

SEQ ID NO: 2852 - DNA, 17 bp, Homo sapiens
atgaggaaaccagctca

SEQ ID NO: 2853 - DNA, 17 bp, Homo sapiens
tgaggaaaccagctcag

SEQ ID NO: 2854 - DNA, 17 bp, Homo sapiens
gaggaaaccagctcagg

SEQ ID NO: 2855 - DNA, 17 bp, Homo sapiens
aggaaaccagctcaggg

SEQ ID NO: 2856 - DNA, 17 bp, Homo sapiens
ggaaaccagctcagggc

SEQ ID NO: 2857 - DNA, 17 bp, Homo sapiens
gaaaccagctcagggct

SEQ ID NO: 2858 - DNA, 17 bp, Homo sapiens
aaaccagctcagggctc

SEQ ID NO: 2859 - DNA, 17 bp, Homo sapiens
aaccagctcagggctca

SEQ ID NO: 2860 - DNA, 17 bp, Homo sapiens
accagctcagggctcaa

SEQ ID NO: 2861 - DNA, 17 bp, Homo sapiens
ccagctcagggctcaag

SEQ ID NO: 2862 - DNA, 17 bp, Homo sapiens
cagctcagggctcaaga

SEQ ID NO: 2863 - DNA, 17 bp, Homo sapiens
agctcagggctcaagat

SEQ ID NO: 2864 - DNA, 17 bp, Homo sapiens
gctcagggctcaagatg

SEQ ID NO: 2865 - DNA, 17 bp, Homo sapiens
ctcagggctcaagatga

SEQ ID NO: 2866 - DNA, 17 bp, Homo sapiens
tcagggctcaagatgac

SEQ ID NO: 2867 - DNA, 17 bp, Homo sapiens
cagggctcaagatgaca

SEQ ID NO: 2868 - DNA, 17 bp, Homo sapiens
agggctcaagatgacag

SEQ ID NO: 2869 - DNA, 17 bp, Homo sapiens
gggctcaagatgacagg

SEQ ID NO: 2870 - DNA, 17 bp, Homo sapiens
ggctcaagatgacagga

SEQ ID NO: 2871 - DNA, 17 bp, Homo sapiens
gctcaagatgacaggag

SEQ ID NO: 2872 - DNA, 17 bp, Homo sapiens
ctcaagatgacaggagt

SEQ ID NO: 2873 - DNA, 17 bp, Homo sapiens
tcaagatgacaggagtg

SEQ ID NO: 2874 - DNA, 17 bp, Homo sapiens
caagatgacaggagtgg

SEQ ID NO: 2875 - DNA, 17 bp, Homo sapiens
aagatgacaggagtgga

SEQ ID NO: 2876 - DNA, 17 bp, Homo sapiens
agatgacaggagtggac

SEQ ID NO: 2877 - DNA, 17 bp, Homo sapiens
gatgacaggagtggact

SEQ ID NO: 2878 - DNA, 17 bp, Homo sapiens
atgacaggagtggactg

SEQ ID NO: 2879 - DNA, 17 bp, Homo sapiens
tgacaggagtggactgt

SEQ ID NO: 2880 - DNA, 17 bp, Homo sapiens
gacaggagtggactgtg

SEQ ID NO: 2881 - DNA, 17 bp, Homo sapiens
acaggagtggactgtgt

SEQ ID NO: 2882 - DNA, 17 bp, Homo sapiens
caggagtggactgtgtg

SEQ ID NO: 2883 - DNA, 17 bp, Homo sapiens
aggagtggactgtgtgg

SEQ ID NO: 2884 - DNA, 17 bp, Homo sapiens
ggagtggactgtgtgga

SEQ ID NO: 2885 - DNA, 17 bp, Homo sapiens
gagtggactgtgtggag

SEQ ID NO: 2886 - DNA, 17 bp, Homo sapiens
agtggactgtgtggagg

SEQ ID NO: 2887 - DNA, 17 bp, Homo sapiens
gtggactgtgtggaggg

SEQ ID NO: 2888 - DNA, 17 bp, Homo sapiens
tggactgtgtggagggg

SEQ ID NO: 2889 - DNA, 17 bp, Homo sapiens
ggactgtgtggagggga

SEQ ID NO: 2890 - DNA, 17 bp, Homo sapiens
gactgtgtggaggggat

SEQ ID NO: 2891 - DNA, 17 bp, Homo sapiens
actgtgtggaggggatg

SEQ ID NO: 2892 - DNA, 17 bp, Homo sapiens
ctgtgtggaggggatgg

SEQ ID NO: 2893 - DNA, 17 bp, Homo sapiens
tgtgtggaggggatggc

SEQ ID NO: 2894 - DNA, 17 bp, Homo sapiens
gtgtggaggggatggcc

SEQ ID NO: 2895 - DNA, 17 bp, Homo sapiens
tgtggaggggatggcct

SEQ ID NO: 2896 - DNA, 17 bp, Homo sapiens
gtggaggggatggcctc

SEQ ID NO: 2897 - DNA, 17 bp, Homo sapiens
tggaggggatggcctcg

SEQ ID NO: 2898 - DNA, 17 bp, Homo sapiens
ggaggggatggcctcgg

SEQ ID NO: 2899 - DNA, 17 bp, Homo sapiens
gaggggatggcctcggg

SEQ ID NO: 2900 - DNA, 17 bp, Homo sapiens
aggggatggcctcgggc

SEQ ID NO: 2901 - DNA, 17 bp, Homo sapiens
ggggatggcctcgggcc

SEQ ID NO: 2902 - DNA, 17 bp, Homo sapiens
gggatggcctcgggcct

SEQ ID NO: 2903 - DNA, 17 bp, Homo sapiens
ggatggcctcgggcctg

SEQ ID NO: 2904 - DNA, 17 bp, Homo sapiens
gatggcctcgggcctgt

SEQ ID NO: 2905 - DNA, 17 bp, Homo sapiens
atggcctcgggcctgta

SEQ ID NO: 2906 - DNA, 17 bp, Homo sapiens
tggcctcgggcctgtac

SEQ ID NO: 2907 - DNA, 17 bp, Homo sapiens
ggcctcgggcctgtacc

SEQ ID NO: 2908 - DNA, 17 bp, Homo sapiens
gcctcgggcctgtacca

SEQ ID NO: 2909 - DNA, 17 bp, Homo sapiens
cctcgggcctgtaccag

SEQ ID NO: 2910 - DNA, 17 bp, Homo sapiens
ctcgggcctgtaccagg

SEQ ID NO: 2911 - DNA, 17 bp, Homo sapiens
tcgggcctgtaccagga

SEQ ID NO: 2912 - DNA, 17 bp, Homo sapiens
cgggcctgtaccaggaa

SEQ ID NO: 2913 - DNA, 17 bp, Homo sapiens
gggcctgtaccaggaac

SEQ ID NO: 2914 - DNA, 17 bp, Homo sapiens
ggcctgtaccaggaact

SEQ ID NO: 2915 - DNA, 17 bp, Homo sapiens
gcctgtaccaggaactc

SEQ ID NO: 2916 - DNA, 17 bp, Homo sapiens
cctgtaccaggaactct

SEQ ID NO: 2917 - DNA, 17 bp, Homo sapiens
ctgtaccaggaactctt

SEQ ID NO: 2918 - DNA, 17 bp, Homo sapiens
tgtaccaggaactcttt

SEQ ID NO: 2919 - DNA, 17 bp, Homo sapiens
gtaccaggaactctttg

SEQ ID NO: 2920 - DNA, 17 bp, Homo sapiens
taccaggaactctttgc

SEQ ID NO: 2921 - DNA, 17 bp, Homo sapiens
accaggaactctttgcg

SEQ ID NO: 2922 - DNA, 17 bp, Homo sapiens
ccaggaactctttgcgg

SEQ ID NO: 2923 - DNA, 17 bp, Homo sapiens
caggaactctttgcggc

SEQ ID NO: 2924 - DNA, 17 bp, Homo sapiens
aggaactctttgcggct

SEQ ID NO: 2925 - DNA, 17 bp, Homo sapiens
ggaactctttgcggctg

SEQ ID NO: 2926 - DNA, 17 bp, Homo sapiens
gaactctttgcggctgt

SEQ ID NO: 2927 - DNA, 17 bp, Homo sapiens
aactctttgcggctgtg

SEQ ID NO: 2928 - DNA, 17 bp, Homo sapiens
actctttgcggctgtgg

SEQ ID NO: 2929 - DNA, 17 bp, Homo sapiens
ctctttgcggctgtggt

SEQ ID NO: 2930 - DNA, 17 bp, Homo sapiens
tctttgcggctgtggtc

SEQ ID NO: 2931 - DNA, 17 bp, Homo sapiens
ctttgcggctgtggtct

SEQ ID NO: 2932 - DNA, 17 bp, Homo sapiens
tttgcggctgtggtctc

SEQ ID NO: 2933 - DNA, 17 bp, Homo sapiens
ttgcggctgtggtctca

SEQ ID NO: 2934 - DNA, 17 bp, Homo sapiens
tgcggctgtggtctcac

SEQ ID NO: 2935 - DNA, 17 bp, Homo sapiens
gcggctgtggtctcact

SEQ ID NO: 2936 - DNA, 17 bp, Homo sapiens
cggctgtggtctcactc

SEQ ID NO: 2937 - DNA, 17 bp, Homo sapiens
ggctgtggtctcactca

SEQ ID NO: 2938 - DNA, 17 bp, Homo sapiens
gctgtggtctcactcat

SEQ ID NO: 2939 - DNA, 17 bp, Homo sapiens
ctgtggtctcactcatc

SEQ ID NO: 2940 - DNA, 17 bp, Homo sapiens
tgtggtctcactcatca

SEQ ID NO: 2941 - DNA, 17 bp, Homo sapiens
gtggtctcactcatcaa

SEQ ID NO: 2942 - DNA, 17 bp, Homo sapiens
tggtctcactcatcaac

SEQ ID NO: 2943 - DNA, 25 bp, Homo sapiens
cacccggggagacgtcttagacagt

SEQ ID NO: 2944 - DNA, 25 bp, Homo sapiens
acccggggagacgtcttagacagtc

SEQ ID NO: 2945 - DNA, 25 bp, Homo sapiens
cccggggagacgtcttagacagtcg

SEQ ID NO: 2946 - DNA, 25 bp, Homo sapiens
ccggggagacgtcttagacagtcgt

SEQ ID NO: 2947 - DNA, 25 bp, Homo sapiens
cggggagacgtcttagacagtcgtg

SEQ ID NO: 2948 - DNA, 25 bp, Homo sapiens
ggggagacgtcttagacagtcgtgg

SEQ ID NO: 2949 - DNA, 25 bp, Homo sapiens
gggagacgtcttagacagtcgtggt

SEQ ID NO: 2950 - DNA, 25 bp, Homo sapiens
ggagacgtcttagacagtcgtggtt

SEQ ID NO: 2951 - DNA, 25 bp, Homo sapiens
gagacgtcttagacagtcgtggttc

SEQ ID NO: 2952 - DNA, 25 bp, Homo sapiens
agacgtcttagacagtcgtggttcc

SEQ ID NO: 2953 - DNA, 25 bp, Homo sapiens
gacgtcttagacagtcgtggttcct

SEQ ID NO: 2954 - DNA, 25 bp, Homo sapiens
acgtcttagacagtcgtggttcctg

SEQ ID NO: 2955 - DNA, 25 bp, Homo sapiens
cgtcttagacagtcgtggttcctgt

SEQ ID NO: 2956 - DNA, 25 bp, Homo sapiens
gtcttagacagtcgtggttcctgtg

SEQ ID NO: 2957 - DNA, 25 bp, Homo sapiens
tcttagacagtcgtggttcctgtga

SEQ ID NO: 2958 - DNA, 25 bp, Homo sapiens
cttagacagtcgtggttcctgtgat

SEQ ID NO: 2959 - DNA, 25 bp, Homo sapiens
ttagacagtcgtggttcctgtgatc

SEQ ID NO: 2960 - DNA, 25 bp, Homo sapiens
tagacagtcgtggttcctgtgatct

SEQ ID NO: 2961 - DNA, 25 bp, Homo sapiens
agacagtcgtggttcctgtgatctg

SEQ ID NO: 2962 - DNA, 25 bp, Homo sapiens
gacagtcgtggttcctgtgatctgt

SEQ ID NO: 2963 - DNA, 25 bp, Homo sapiens
acagtcgtggttcctgtgatctgtg

SEQ ID NO: 2964 - DNA, 25 bp, Homo sapiens
cagtcgtggttcctgtgatctgtgt

SEQ ID NO: 2965 - DNA, 25 bp, Homo sapiens
agtcgtggttcctgtgatctgtgtc

SEQ ID NO: 2966 - DNA, 25 bp, Homo sapiens
gtcgtggttcctgtgatctgtgtcc

SEQ ID NO: 2967 - DNA, 25 bp, Homo sapiens
tcgtggttcctgtgatctgtgtcct

SEQ ID NO: 2968 - DNA, 25 bp, Homo sapiens
cgtggttcctgtgatctgtgtcctc

SEQ ID NO: 2969 - DNA, 25 bp, Homo sapiens
gtggttcctgtgatctgtgtcctct

SEQ ID NO: 2970 - DNA, 25 bp, Homo sapiens
tggttcctgtgatctgtgtcctctt

SEQ ID NO: 2971 - DNA, 25 bp, Homo sapiens
ggttcctgtgatctgtgtcctcttt

SEQ ID NO: 2972 - DNA, 25 bp, Homo sapiens
gttcctgtgatctgtgtcctctttg

SEQ ID NO: 2973 - DNA, 25 bp, Homo sapiens
ttcctgtgatctgtgtcctctttgc

SEQ ID NO: 2974 - DNA, 25 bp, Homo sapiens
tcctgtgatctgtgtcctctttgca

SEQ ID NO: 2975 - DNA, 25 bp, Homo sapiens
cctgtgatctgtgtcctctttgcag

SEQ ID NO: 2976 - DNA, 25 bp, Homo sapiens
ctgtgatctgtgtcctctttgcaga

SEQ ID NO: 2977 - DNA, 25 bp, Homo sapiens
tgtgatctgtgtcctctttgcagaa

SEQ ID NO: 2978 - DNA, 25 bp, Homo sapiens
gtgatctgtgtcctctttgcagaag

SEQ ID NO: 2979 - DNA, 25 bp, Homo sapiens
tgatctgtgtcctctttgcagaagt

SEQ ID NO: 2980 - DNA, 25 bp, Homo sapiens
gatctgtgtcctctttgcagaagtt

SEQ ID NO: 2981 - DNA, 25 bp, Homo sapiens
atctgtgtcctctttgcagaagttc

SEQ ID NO: 2982 - DNA, 25 bp, Homo sapiens
tctgtgtcctctttgcagaagttct

SEQ ID NO: 2983 - DNA, 25 bp, Homo sapiens
ctgtgtcctctttgcagaagttctg

SEQ ID NO: 2984 - DNA, 25 bp, Homo sapiens
tgtgtcctctttgcagaagttctgt

SEQ ID NO: 2985 - DNA, 25 bp, Homo sapiens
gtgtcctctttgcagaagttctgtg

SEQ ID NO: 2986 - DNA, 25 bp, Homo sapiens
tgtcctctttgcagaagttctgtgt

SEQ ID NO: 2987 - DNA, 25 bp, Homo sapiens
gtcctctttgcagaagttctgtgtc

SEQ ID NO: 2988 - DNA, 25 bp, Homo sapiens
tcctctttgcagaagttctgtgtcc

SEQ ID NO: 2989 - DNA, 25 bp, Homo sapiens
cctctttgcagaagttctgtgtcca

SEQ ID NO: 2990 - DNA, 25 bp, Homo sapiens
ctctttgcagaagttctgtgtccat

SEQ ID NO: 2991 - DNA, 25 bp, Homo sapiens
tctttgcagaagttctgtgtccatc

SEQ ID NO: 2992 - DNA, 25 bp, Homo sapiens
ctttgcagaagttctgtgtccatct

SEQ ID NO: 2993 - DNA, 25 bp, Homo sapiens
tttgcagaagttctgtgtccatctc

SEQ ID NO: 2994 - DNA, 25 bp, Homo sapiens
ttgcagaagttctgtgtccatctca

SEQ ID NO: 2995 - DNA, 25 bp, Homo sapiens
tgcagaagttctgtgtccatctcat

SEQ ID NO: 2996 - DNA, 25 bp, Homo sapiens
gcagaagttctgtgtccatctcatg

SEQ ID NO: 2997 - DNA, 25 bp, Homo sapiens
cagaagttctgtgtccatctcatgt

SEQ ID NO: 2998 - DNA, 25 bp, Homo sapiens
agaagttctgtgtccatctcatgtg

SEQ ID NO: 2999 - DNA, 25 bp, Homo sapiens
gaagttctgtgtccatctcatgtgc

SEQ ID NO: 3000 - DNA, 25 bp, Homo sapiens
aagttctgtgtccatctcatgtgct

SEQ ID NO: 3001 - DNA, 25 bp, Homo sapiens
agttctgtgtccatctcatgtgctg

SEQ ID NO: 3002 - DNA, 25 bp, Homo sapiens
gttctgtgtccatctcatgtgctgc

SEQ ID NO: 3003 - DNA, 25 bp, Homo sapiens
ttctgtgtccatctcatgtgctgcg

SEQ ID NO: 3004 - DNA, 25 bp, Homo sapiens
tctgtgtccatctcatgtgctgcgt

SEQ ID NO: 3005 - DNA, 25 bp, Homo sapiens
ctgtgtccatctcatgtgctgcgtg

SEQ ID NO: 3006 - DNA, 25 bp, Homo sapiens
tgtgtccatctcatgtgctgcgtgt

SEQ ID NO: 3007 - DNA, 25 bp, Homo sapiens
gtgtccatctcatgtgctgcgtgtg

SEQ ID NO: 3008 - DNA, 25 bp, Homo sapiens
tgtccatctcatgtgctgcgtgtgt

SEQ ID NO: 3009 - DNA, 25 bp, Homo sapiens
gtccatctcatgtgctgcgtgtgtc

SEQ ID NO: 3010 - DNA, 25 bp, Homo sapiens
tccatctcatgtgctgcgtgtgtct

SEQ ID NO: 3011 - DNA, 25 bp, Homo sapiens
ccatctcatgtgctgcgtgtgtctg

SEQ ID NO: 3012 - DNA, 25 bp, Homo sapiens
catctcatgtgctgcgtgtgtctgt

SEQ ID NO: 3013 - DNA, 25 bp, Homo sapiens
atctcatgtgctgcgtgtgtctgta

SEQ ID NO: 3014 - DNA, 25 bp, Homo sapiens
tctcatgtgctgcgtgtgtctgtaa

SEQ ID NO: 3015 - DNA, 25 bp, Homo sapiens
ctcatgtgctgcgtgtgtctgtaaa

SEQ ID NO: 3016 - DNA, 25 bp, Homo sapiens
tcatgtgctgcgtgtgtctgtaaag

SEQ ID NO: 3017 - DNA, 25 bp, Homo sapiens
catgtgctgcgtgtgtctgtaaagc

SEQ ID NO: 3018 - DNA, 25 bp, Homo sapiens
atgtgctgcgtgtgtctgtaaagcc

SEQ ID NO: 3019 - DNA, 25 bp, Homo sapiens
tgtgctgcgtgtgtctgtaaagcct

SEQ ID NO: 3020 - DNA, 25 bp, Homo sapiens
gtgctgcgtgtgtctgtaaagcctc

SEQ ID NO: 3021 - DNA, 25 bp, Homo sapiens
tgctgcgtgtgtctgtaaagcctca

SEQ ID NO: 3022 - DNA, 25 bp, Homo sapiens
gctgcgtgtgtctgtaaagcctcat

SEQ ID NO: 3023 - DNA, 25 bp, Homo sapiens
ctgcgtgtgtctgtaaagcctcatt

SEQ ID NO: 3024 - DNA, 25 bp, Homo sapiens
tgcgtgtgtctgtaaagcctcattc

SEQ ID NO: 3025 - DNA, 25 bp, Homo sapiens
gcgtgtgtctgtaaagcctcattcc

SEQ ID NO: 3026 - DNA, 25 bp, Homo sapiens
cgtgtgtctgtaaagcctcattccg

SEQ ID NO: 3027 - DNA, 25 bp, Homo sapiens
gtgtgtctgtaaagcctcattccgt

SEQ ID NO: 3028 - DNA, 25 bp, Homo sapiens
tgtgtctgtaaagcctcattccgtg

SEQ ID NO: 3029 - DNA, 25 bp, Homo sapiens
gtgtctgtaaagcctcattccgtgc

SEQ ID NO: 3030 - DNA, 25 bp, Homo sapiens
tgtctgtaaagcctcattccgtgct

SEQ ID NO: 3031 - DNA, 25 bp, Homo sapiens
gtctgtaaagcctcattccgtgctg

SEQ ID NO: 3032 - DNA, 25 bp, Homo sapiens
tctgtaaagcctcattccgtgctgt

SEQ ID NO: 3033 - DNA, 25 bp, Homo sapiens
ctgtaaagcctcattccgtgctgtc

SEQ ID NO: 3034 - DNA, 25 bp, Homo sapiens
tgtaaagcctcattccgtgctgtct

SEQ ID NO: 3035 - DNA, 25 bp, Homo sapiens
gtaaagcctcattccgtgctgtctg

SEQ ID NO: 3036 - DNA, 25 bp, Homo sapiens
taaagcctcattccgtgctgtctgg

SEQ ID NO: 3037 - DNA, 25 bp, Homo sapiens
aaagcctcattccgtgctgtctggc

SEQ ID NO: 3038 - DNA, 25 bp, Homo sapiens
aagcctcattccgtgctgtctggca

SEQ ID NO: 3039 - DNA, 25 bp, Homo sapiens
agcctcattccgtgctgtctggcag

SEQ ID NO: 3040 - DNA, 25 bp, Homo sapiens
gcctcattccgtgctgtctggcagg

SEQ ID NO: 3041 - DNA, 25 bp, Homo sapiens
cctcattccgtgctgtctggcagga

SEQ ID NO: 3042 - DNA, 25 bp, Homo sapiens
ctcattccgtgctgtctggcaggaa

SEQ ID NO: 3043 - DNA, 25 bp, Homo sapiens
tcattccgtgctgtctggcaggaag

SEQ ID NO: 3044 - DNA, 25 bp, Homo sapiens
cattccgtgctgtctggcaggaagc

SEQ ID NO: 3045 - DNA, 25 bp, Homo sapiens
attccgtgctgtctggcaggaagct

SEQ ID NO: 3046 - DNA, 25 bp, Homo sapiens
ttccgtgctgtctggcaggaagctc

SEQ ID NO: 3047 - DNA, 25 bp, Homo sapiens
tccgtgctgtctggcaggaagctcc

SEQ ID NO: 3048 - DNA, 25 bp, Homo sapiens
ccgtgctgtctggcaggaagctcca

SEQ ID NO: 3049 - DNA, 25 bp, Homo sapiens
cgtgctgtctggcaggaagctccat

SEQ ID NO: 3050 - DNA, 25 bp, Homo sapiens
gtgctgtctggcaggaagctccatc

SEQ ID NO: 3051 - DNA, 25 bp, Homo sapiens
tgctgtctggcaggaagctccatct

SEQ ID NO: 3052 - DNA, 25 bp, Homo sapiens
gctgtctggcaggaagctccatctc

SEQ ID NO: 3053 - DNA, 25 bp, Homo sapiens
ctgtctggcaggaagctccatctca

SEQ ID NO: 3054 - DNA, 25 bp, Homo sapiens
tgtctggcaggaagctccatctcat

SEQ ID NO: 3055 - DNA, 25 bp, Homo sapiens
gtctggcaggaagctccatctcatc

SEQ ID NO: 3056 - DNA, 25 bp, Homo sapiens
tctggcaggaagctccatctcatct

SEQ ID NO: 3057 - DNA, 25 bp, Homo sapiens
ctggcaggaagctccatctcatctc

SEQ ID NO: 3058 - DNA, 25 bp, Homo sapiens
tggcaggaagctccatctcatctca

SEQ ID NO: 3059 - DNA, 25 bp, Homo sapiens
ggcaggaagctccatctcatctcat

SEQ ID NO: 3060 - DNA, 25 bp, Homo sapiens
gcaggaagctccatctcatctcatc

SEQ ID NO: 3061 - DNA, 25 bp, Homo sapiens
caggaagctccatctcatctcatca

SEQ ID NO: 3062 - DNA, 25 bp, Homo sapiens
aggaagctccatctcatctcatcat

SEQ ID NO: 3063 - DNA, 25 bp, Homo sapiens
ggaagctccatctcatctcatcatc

SEQ ID NO: 3064 - DNA, 25 bp, Homo sapiens
gaagctccatctcatctcatcatct

SEQ ID NO: 3065 - DNA, 25 bp, Homo sapiens
aagctccatctcatctcatcatctc

SEQ ID NO: 3066 - DNA, 25 bp, Homo sapiens
agctccatctcatctcatcatctca

SEQ ID NO: 3067 - DNA, 25 bp, Homo sapiens
gctccatctcatctcatcatctcac

SEQ ID NO: 3068 - DNA, 25 bp, Homo sapiens
ctccatctcatctcatcatctcacg

SEQ ID NO: 3069 - DNA, 25 bp, Homo sapiens
tccatctcatctcatcatctcacgg

SEQ ID NO: 3070 - DNA, 25 bp, Homo sapiens
ccatctcatctcatcatctcacggc

SEQ ID NO: 3071 - DNA, 25 bp, Homo sapiens
catctcatctcatcatctcacggcc

SEQ ID NO: 3072 - DNA, 25 bp, Homo sapiens
atctcatctcatcatctcacggccc

SEQ ID NO: 3073 - DNA, 25 bp, Homo sapiens
tctcatctcatcatctcacggccct

SEQ ID NO: 3074 - DNA, 25 bp, Homo sapiens
ctcatctcatcatctcacggccctg

SEQ ID NO: 3075 - DNA, 25 bp, Homo sapiens
tcatctcatcatctcacggccctgg

SEQ ID NO: 3076 - DNA, 25 bp, Homo sapiens
catctcatcatctcacggccctggc

SEQ ID NO: 3077 - DNA, 25 bp, Homo sapiens
atctcatcatctcacggccctggca

SEQ ID NO: 3078 - DNA, 25 bp, Homo sapiens
tctcatcatctcacggccctggcac

SEQ ID NO: 3079 - DNA, 25 bp, Homo sapiens
ctcatcatctcacggccctggcact

SEQ ID NO: 3080 - DNA, 25 bp, Homo sapiens
tcatcatctcacggccctggcactg

SEQ ID NO: 3081 - DNA, 25 bp, Homo sapiens
catcatctcacggccctggcactgc

SEQ ID NO: 3082 - DNA, 25 bp, Homo sapiens
atcatctcacggccctggcactgcc

SEQ ID NO: 3083 - DNA, 25 bp, Homo sapiens
tcatctcacggccctggcactgcct

SEQ ID NO: 3084 - DNA, 25 bp, Homo sapiens
catctcacggccctggcactgcctc

SEQ ID NO: 3085 - DNA, 25 bp, Homo sapiens
atctcacggccctggcactgcctca

SEQ ID NO: 3086 - DNA, 25 bp, Homo sapiens
tctcacggccctggcactgcctcag

SEQ ID NO: 3087 - DNA, 25 bp, Homo sapiens
ctcacggccctggcactgcctcagc

SEQ ID NO: 3088 - DNA, 25 bp, Homo sapiens
tcacggccctggcactgcctcagca

SEQ ID NO: 3089 - DNA, 25 bp, Homo sapiens
cacggccctggcactgcctcagcat

SEQ ID NO: 3090 - DNA, 25 bp, Homo sapiens
acggccctggcactgcctcagcatg

SEQ ID NO: 3091 - DNA, 25 bp, Homo sapiens
cggccctggcactgcctcagcatgg

SEQ ID NO: 3092 - DNA, 25 bp, Homo sapiens
ggccctggcactgcctcagcatggc

SEQ ID NO: 3093 - DNA, 25 bp, Homo sapiens
gccctggcactgcctcagcatggcc

SEQ ID NO: 3094 - DNA, 25 bp, Homo sapiens
ccctggcactgcctcagcatggcca

SEQ ID NO: 3095 - DNA, 25 bp, Homo sapiens
cctggcactgcctcagcatggccat

SEQ ID NO: 3096 - DNA, 25 bp, Homo sapiens
ctggcactgcctcagcatggccatc

SEQ ID NO: 3097 - DNA, 25 bp, Homo sapiens
tggcactgcctcagcatggccatct

SEQ ID NO: 3098 - DNA, 25 bp, Homo sapiens
ggcactgcctcagcatggccatctc

SEQ ID NO: 3099 - DNA, 25 bp, Homo sapiens
gcactgcctcagcatggccatctca

SEQ ID NO: 3100 - DNA, 25 bp, Homo sapiens
cactgcctcagcatggccatctcat

SEQ ID NO: 3101 - DNA, 25 bp, Homo sapiens
actgcctcagcatggccatctcatc

SEQ ID NO: 3102 - DNA, 25 bp, Homo sapiens
ctgcctcagcatggccatctcatca

SEQ ID NO: 3103 - DNA, 25 bp, Homo sapiens
tgcctcagcatggccatctcatcac

SEQ ID NO: 3104 - DNA, 25 bp, Homo sapiens
gcctcagcatggccatctcatcacg

SEQ ID NO: 3105 - DNA, 25 bp, Homo sapiens
cctcagcatggccatctcatcacgc

SEQ ID NO: 3106 - DNA, 25 bp, Homo sapiens
ctcagcatggccatctcatcacgcc

SEQ ID NO: 3107 - DNA, 25 bp, Homo sapiens
tcagcatggccatctcatcacgcct

SEQ ID NO: 3108 - DNA, 25 bp, Homo sapiens
cagcatggccatctcatcacgcctc

SEQ ID NO: 3109 - DNA, 25 bp, Homo sapiens
agcatggccatctcatcacgcctcg

SEQ ID NO: 3110 - DNA, 25 bp, Homo sapiens
gcatggccatctcatcacgcctcgc

SEQ ID NO: 3111 - DNA, 25 bp, Homo sapiens
catggccatctcatcacgcctcgcc

SEQ ID NO: 3112 - DNA, 25 bp, Homo sapiens
atggccatctcatcacgcctcgccc

SEQ ID NO: 3113 - DNA, 25 bp, Homo sapiens
tggccatctcatcacgcctcgccct

SEQ ID NO: 3114 - DNA, 25 bp, Homo sapiens
ggccatctcatcacgcctcgccctg

SEQ ID NO: 3115 - DNA, 25 bp, Homo sapiens
gccatctcatcacgcctcgccctgt

SEQ ID NO: 3116 - DNA, 25 bp, Homo sapiens
ccatctcatcacgcctcgccctgtg

SEQ ID NO: 3117 - DNA, 25 bp, Homo sapiens
catctcatcacgcctcgccctgtgg

SEQ ID NO: 3118 - DNA, 25 bp, Homo sapiens
atctcatcacgcctcgccctgtggg

SEQ ID NO: 3119 - DNA, 25 bp, Homo sapiens
tctcatcacgcctcgccctgtggga

SEQ ID NO: 3120 - DNA, 25 bp, Homo sapiens
ctcatcacgcctcgccctgtgggag

SEQ ID NO: 3121 - DNA, 25 bp, Homo sapiens
tcatcacgcctcgccctgtgggagc

SEQ ID NO: 3122 - DNA, 25 bp, Homo sapiens
catcacgcctcgccctgtgggagca

SEQ ID NO: 3123 - DNA, 25 bp, Homo sapiens
atcacgcctcgccctgtgggagcag

SEQ ID NO: 3124 - DNA, 25 bp, Homo sapiens
tcacgcctcgccctgtgggagcaga

SEQ ID NO: 3125 - DNA, 25 bp, Homo sapiens
cacgcctcgccctgtgggagcagaa

SEQ ID NO: 3126 - DNA, 25 bp, Homo sapiens
acgcctcgccctgtgggagcagaag

SEQ ID NO: 3127 - DNA, 25 bp, Homo sapiens
cgcctcgccctgtgggagcagaaga

SEQ ID NO: 3128 - DNA, 25 bp, Homo sapiens
gcctcgccctgtgggagcagaagat

SEQ ID NO: 3129 - DNA, 25 bp, Homo sapiens
cctcgccctgtgggagcagaagatt

SEQ ID NO: 3130 - DNA, 25 bp, Homo sapiens
ctcgccctgtgggagcagaagattc

SEQ ID NO: 3131 - DNA, 25 bp, Homo sapiens
tcgccctgtgggagcagaagattcg

SEQ ID NO: 3132 - DNA, 25 bp, Homo sapiens
cgccctgtgggagcagaagattcgg

SEQ ID NO: 3133 - DNA, 25 bp, Homo sapiens
gccctgtgggagcagaagattcggg

SEQ ID NO: 3134 - DNA, 25 bp, Homo sapiens
ccctgtgggagcagaagattcggga

SEQ ID NO: 3135 - DNA, 25 bp, Homo sapiens
cctgtgggagcagaagattcgggaa

SEQ ID NO: 3136 - DNA, 25 bp, Homo sapiens
ctgtgggagcagaagattcgggaag

SEQ ID NO: 3137 - DNA, 25 bp, Homo sapiens
tgtgggagcagaagattcgggaaga

SEQ ID NO: 3138 - DNA, 25 bp, Homo sapiens
gtgggagcagaagattcgggaagag

SEQ ID NO: 3139 - DNA, 25 bp, Homo sapiens
tgggagcagaagattcgggaagagg

SEQ ID NO: 3140 - DNA, 25 bp, Homo sapiens
gggagcagaagattcgggaagagga

SEQ ID NO: 3141 - DNA, 25 bp, Homo sapiens
ggagcagaagattcgggaagaggac

SEQ ID NO: 3142 - DNA, 25 bp, Homo sapiens
gagcagaagattcgggaagaggaca

SEQ ID NO: 3143 - DNA, 25 bp, Homo sapiens
agcagaagattcgggaagaggacaa

SEQ ID NO: 3144 - DNA, 25 bp, Homo sapiens
gcagaagattcgggaagaggacaag

SEQ ID NO: 3145 - DNA, 25 bp, Homo sapiens
cagaagattcgggaagaggacaaga

SEQ ID NO: 3146 - DNA, 25 bp, Homo sapiens
agaagattcgggaagaggacaagag

SEQ ID NO: 3147 - DNA, 25 bp, Homo sapiens
gaagattcgggaagaggacaagagc

SEQ ID NO: 3148 - DNA, 25 bp, Homo sapiens
aagattcgggaagaggacaagagcc

SEQ ID NO: 3149 - DNA, 25 bp, Homo sapiens
agattcgggaagaggacaagagccc

SEQ ID NO: 3150 - DNA, 25 bp, Homo sapiens
gattcgggaagaggacaagagccct

SEQ ID NO: 3151 - DNA, 25 bp, Homo sapiens
attcgggaagaggacaagagccctc

SEQ ID NO: 3152 - DNA, 25 bp, Homo sapiens
ttcgggaagaggacaagagccctcc

SEQ ID NO: 3153 - DNA, 25 bp, Homo sapiens
tcgggaagaggacaagagccctcca

SEQ ID NO: 3154 - DNA, 25 bp, Homo sapiens
cgggaagaggacaagagccctccac

SEQ ID NO: 3155 - DNA, 25 bp, Homo sapiens
gggaagaggacaagagccctccacc

SEQ ID NO: 3156 - DNA, 25 bp, Homo sapiens
ggaagaggacaagagccctccacca

SEQ ID NO: 3157 - DNA, 25 bp, Homo sapiens
gaagaggacaagagccctccaccat

SEQ ID NO: 3158 - DNA, 25 bp, Homo sapiens
aagaggacaagagccctccaccatc

SEQ ID NO: 3159 - DNA, 25 bp, Homo sapiens
agaggacaagagccctccaccatcc

SEQ ID NO: 3160 - DNA, 25 bp, Homo sapiens
gaggacaagagccctccaccatcct

SEQ ID NO: 3161 - DNA, 25 bp, Homo sapiens
aggacaagagccctccaccatcctc

SEQ ID NO: 3162 - DNA, 25 bp, Homo sapiens
ggacaagagccctccaccatcctcg

SEQ ID NO: 3163 - DNA, 25 bp, Homo sapiens
gacaagagccctccaccatcctcgc

SEQ ID NO: 3164 - DNA, 25 bp, Homo sapiens
acaagagccctccaccatcctcgcc

SEQ ID NO: 3165 - DNA, 25 bp, Homo sapiens
caagagccctccaccatcctcgccc

SEQ ID NO: 3166 - DNA, 25 bp, Homo sapiens
aagagccctccaccatcctcgcccc

SEQ ID NO: 3167 - DNA, 25 bp, Homo sapiens
agagccctccaccatcctcgccccc

SEQ ID NO: 3168 - DNA, 25 bp, Homo sapiens
gagccctccaccatcctcgccccct

SEQ ID NO: 3169 - DNA, 25 bp, Homo sapiens
agccctccaccatcctcgccccctc

SEQ ID NO: 3170 - DNA, 25 bp, Homo sapiens
gccctccaccatcctcgccccctcc

SEQ ID NO: 3171 - DNA, 25 bp, Homo sapiens
ccctccaccatcctcgccccctcct

SEQ ID NO: 3172 - DNA, 25 bp, Homo sapiens
cctccaccatcctcgccccctcctc

SEQ ID NO: 3173 - DNA, 25 bp, Homo sapiens
ctccaccatcctcgccccctcctct

SEQ ID NO: 3174 - DNA, 25 bp, Homo sapiens
tccaccatcctcgccccctcctctt

SEQ ID NO: 3175 - DNA, 25 bp, Homo sapiens
ccaccatcctcgccccctcctcttt

SEQ ID NO: 3176 - DNA, 25 bp, Homo sapiens
caccatcctcgccccctcctctttt

SEQ ID NO: 3177 - DNA, 25 bp, Homo sapiens
accatcctcgccccctcctcttttc

SEQ ID NO: 3178 - DNA, 25 bp, Homo sapiens
ccatcctcgccccctcctcttttct

SEQ ID NO: 3179 - DNA, 25 bp, Homo sapiens
catcctcgccccctcctcttttctc

SEQ ID NO: 3180 - DNA, 25 bp, Homo sapiens
atcctcgccccctcctcttttctct

SEQ ID NO: 3181 - DNA, 25 bp, Homo sapiens
tcctcgccccctcctcttttctctg

SEQ ID NO: 3182 - DNA, 25 bp, Homo sapiens
cctcgccccctcctcttttctctgt

SEQ ID NO: 3183 - DNA, 25 bp, Homo sapiens
ctcgccccctcctcttttctctgtc

SEQ ID NO: 3184 - DNA, 25 bp, Homo sapiens
tcgccccctcctcttttctctgtca

SEQ ID NO: 3185 - DNA, 25 bp, Homo sapiens
cgccccctcctcttttctctgtcat

SEQ ID NO: 3186 - DNA, 25 bp, Homo sapiens
gccccctcctcttttctctgtcatc

SEQ ID NO: 3187 - DNA, 25 bp, Homo sapiens
ccccctcctcttttctctgtcatcc

SEQ ID NO: 3188 - DNA, 25 bp, Homo sapiens
cccctcctcttttctctgtcatccc

SEQ ID NO: 3189 - DNA, 25 bp, Homo sapiens
ccctcctcttttctctgtcatccca

SEQ ID NO: 3190 - DNA, 25 bp, Homo sapiens
cctcctcttttctctgtcatcccag

SEQ ID NO: 3191 - DNA, 25 bp, Homo sapiens
ctcctcttttctctgtcatcccagg

SEQ ID NO: 3192 - DNA, 25 bp, Homo sapiens
tcctcttttctctgtcatcccaggg

SEQ ID NO: 3193 - DNA, 25 bp, Homo sapiens
cctcttttctctgtcatcccagggg

SEQ ID NO: 3194 - DNA, 25 bp, Homo sapiens
ctcttttctctgtcatcccaggggg

SEQ ID NO: 3195 - DNA, 25 bp, Homo sapiens
tcttttctctgtcatcccagggggc

SEQ ID NO: 3196 - DNA, 25 bp, Homo sapiens
cttttctctgtcatcccagggggct

SEQ ID NO: 3197 - DNA, 25 bp, Homo sapiens
ttttctctgtcatcccagggggctt

SEQ ID NO: 3198 - DNA, 25 bp, Homo sapiens
tttctctgtcatcccagggggcttc

SEQ ID NO: 3199 - DNA, 25 bp, Homo sapiens
ttctctgtcatcccagggggcttca

SEQ ID NO: 3200 - DNA, 25 bp, Homo sapiens
tctctgtcatcccagggggcttcat

SEQ ID NO: 3201 - DNA, 25 bp, Homo sapiens
ctctgtcatcccagggggcttcatt

SEQ ID NO: 3202 - DNA, 25 bp, Homo sapiens
tctgtcatcccagggggcttcatta

SEQ ID NO: 3203 - DNA, 25 bp, Homo sapiens
ctgtcatcccagggggcttcattaa

SEQ ID NO: 3204 - DNA, 25 bp, Homo sapiens
tgtcatcccagggggcttcattaag

SEQ ID NO: 3205 - DNA, 25 bp, Homo sapiens
gtcatcccagggggcttcattaagc

SEQ ID NO: 3206 - DNA, 25 bp, Homo sapiens
tcatcccagggggcttcattaagca

SEQ ID NO: 3207 - DNA, 25 bp, Homo sapiens
catcccagggggcttcattaagcaa

SEQ ID NO: 3208 - DNA, 25 bp, Homo sapiens
atcccagggggcttcattaagcaac

SEQ ID NO: 3209 - DNA, 25 bp, Homo sapiens
tcccagggggcttcattaagcaact

SEQ ID NO: 3210 - DNA, 25 bp, Homo sapiens
cccagggggcttcattaagcaactg

SEQ ID NO: 3211 - DNA, 25 bp, Homo sapiens
ccagggggcttcattaagcaactgg

SEQ ID NO: 3212 - DNA, 25 bp, Homo sapiens
cagggggcttcattaagcaactggt

SEQ ID NO: 3213 - DNA, 25 bp, Homo sapiens
agggggcttcattaagcaactggtc

SEQ ID NO: 3214 - DNA, 25 bp, Homo sapiens
gggggcttcattaagcaactggtcc

SEQ ID NO: 3215 - DNA, 25 bp, Homo sapiens
ggggcttcattaagcaactggtccg

SEQ ID NO: 3216 - DNA, 25 bp, Homo sapiens
gggcttcattaagcaactggtccgg

SEQ ID NO: 3217 - DNA, 25 bp, Homo sapiens
ggcttcattaagcaactggtccggg

SEQ ID NO: 3218 - DNA, 25 bp, Homo sapiens
gcttcattaagcaactggtccgggg

SEQ ID NO: 3219 - DNA, 25 bp, Homo sapiens
cttcattaagcaactggtccggggg

SEQ ID NO: 3220 - DNA, 25 bp, Homo sapiens
ttcattaagcaactggtccggggga

SEQ ID NO: 3221 - DNA, 25 bp, Homo sapiens
tcattaagcaactggtccgggggac

SEQ ID NO: 3222 - DNA, 25 bp, Homo sapiens
cattaagcaactggtccgggggact

SEQ ID NO: 3223 - DNA, 25 bp, Homo sapiens
attaagcaactggtccgggggactg

SEQ ID NO: 3224 - DNA, 25 bp, Homo sapiens
ttaagcaactggtccgggggactga

SEQ ID NO: 3225 - DNA, 25 bp, Homo sapiens
taagcaactggtccgggggactgaa

SEQ ID NO: 3226 - DNA, 25 bp, Homo sapiens
aagcaactggtccgggggactgaaa

SEQ ID NO: 3227 - DNA, 25 bp, Homo sapiens
agcaactggtccgggggactgaaaa

SEQ ID NO: 3228 - DNA, 25 bp, Homo sapiens
gcaactggtccgggggactgaaaaa

SEQ ID NO: 3229 - DNA, 25 bp, Homo sapiens
caactggtccgggggactgaaaaag

SEQ ID NO: 3230 - DNA, 25 bp, Homo sapiens
aactggtccgggggactgaaaaaga

SEQ ID NO: 3231 - DNA, 25 bp, Homo sapiens
actggtccgggggactgaaaaagag

SEQ ID NO: 3232 - DNA, 25 bp, Homo sapiens
ctggtccgggggactgaaaaagagg

SEQ ID NO: 3233 - DNA, 25 bp, Homo sapiens
tggtccgggggactgaaaaagaggc

SEQ ID NO: 3234 - DNA, 25 bp, Homo sapiens
ggtccgggggactgaaaaagaggcc

SEQ ID NO: 3235 - DNA, 25 bp, Homo sapiens
gtccgggggactgaaaaagaggcca

SEQ ID NO: 3236 - DNA, 25 bp, Homo sapiens
tccgggggactgaaaaagaggccaa

SEQ ID NO: 3237 - DNA, 25 bp, Homo sapiens
ccgggggactgaaaaagaggccaag

SEQ ID NO: 3238 - DNA, 25 bp, Homo sapiens
cgggggactgaaaaagaggccaagg

SEQ ID NO: 3239 - DNA, 25 bp, Homo sapiens
gggggactgaaaaagaggccaagga

SEQ ID NO: 3240 - DNA, 25 bp, Homo sapiens
ggggactgaaaaagaggccaaggaa

SEQ ID NO: 3241 - DNA, 25 bp, Homo sapiens
gggactgaaaaagaggccaaggaag

SEQ ID NO: 3242 - DNA, 25 bp, Homo sapiens
ggactgaaaaagaggccaaggaagc

SEQ ID NO: 3243 - DNA, 25 bp, Homo sapiens
gactgaaaaagaggccaaggaagcg

SEQ ID NO: 3244 - DNA, 25 bp, Homo sapiens
actgaaaaagaggccaaggaagcga

SEQ ID NO: 3245 - DNA, 25 bp, Homo sapiens
ctgaaaaagaggccaaggaagcgag

SEQ ID NO: 3246 - DNA, 25 bp, Homo sapiens
tgaaaaagaggccaaggaagcgaga

SEQ ID NO: 3247 - DNA, 25 bp, Homo sapiens
gaaaaagaggccaaggaagcgagac

SEQ ID NO: 3248 - DNA, 25 bp, Homo sapiens
aaaaagaggccaaggaagcgagaca

SEQ ID NO: 3249 - DNA, 25 bp, Homo sapiens
aaaagaggccaaggaagcgagacag

SEQ ID NO: 3250 - DNA, 25 bp, Homo sapiens
aaagaggccaaggaagcgagacaga

SEQ ID NO: 3251 - DNA, 25 bp, Homo sapiens
aagaggccaaggaagcgagacagag

SEQ ID NO: 3252 - DNA, 25 bp, Homo sapiens
agaggccaaggaagcgagacagagg

SEQ ID NO: 3253 - DNA, 25 bp, Homo sapiens
gaggccaaggaagcgagacagagga

SEQ ID NO: 3254 - DNA, 25 bp, Homo sapiens
aggccaaggaagcgagacagaggaa

SEQ ID NO: 3255 - DNA, 25 bp, Homo sapiens
ggccaaggaagcgagacagaggaag

SEQ ID NO: 3256 - DNA, 25 bp, Homo sapiens
gccaaggaagcgagacagaggaagc

SEQ ID NO: 3257 - DNA, 25 bp, Homo sapiens
ccaaggaagcgagacagaggaagca

SEQ ID NO: 3258 - DNA, 25 bp, Homo sapiens
caaggaagcgagacagaggaagcag

SEQ ID NO: 3259 - DNA, 25 bp, Homo sapiens
aaggaagcgagacagaggaagcagt

SEQ ID NO: 3260 - DNA, 25 bp, Homo sapiens
aggaagcgagacagaggaagcagtt

SEQ ID NO: 3261 - DNA, 25 bp, Homo sapiens
ggaagcgagacagaggaagcagtta

SEQ ID NO: 3262 - DNA, 25 bp, Homo sapiens
gaagcgagacagaggaagcagttag

SEQ ID NO: 3263 - DNA, 25 bp, Homo sapiens
aagcgagacagaggaagcagttagc

SEQ ID NO: 3264 - DNA, 25 bp, Homo sapiens
agcgagacagaggaagcagttagct

SEQ ID NO: 3265 - DNA, 25 bp, Homo sapiens
gcgagacagaggaagcagttagctg

SEQ ID NO: 3266 - DNA, 25 bp, Homo sapiens
cgagacagaggaagcagttagctgt

SEQ ID NO: 3267 - DNA, 25 bp, Homo sapiens
gagacagaggaagcagttagctgtc

SEQ ID NO: 3268 - DNA, 25 bp, Homo sapiens
agacagaggaagcagttagctgtcg

SEQ ID NO: 3269 - DNA, 25 bp, Homo sapiens
gacagaggaagcagttagctgtcgc

SEQ ID NO: 3270 - DNA, 25 bp, Homo sapiens
acagaggaagcagttagctgtcgcc

SEQ ID NO: 3271 - DNA, 25 bp, Homo sapiens
cagaggaagcagttagctgtcgcct

SEQ ID NO: 3272 - DNA, 25 bp, Homo sapiens
agaggaagcagttagctgtcgcctc

SEQ ID NO: 3273 - DNA, 25 bp, Homo sapiens
gaggaagcagttagctgtcgcctct

SEQ ID NO: 3274 - DNA, 25 bp, Homo sapiens
aggaagcagttagctgtcgcctctc

SEQ ID NO: 3275 - DNA, 25 bp, Homo sapiens
ggaagcagttagctgtcgcctctcc

SEQ ID NO: 3276 - DNA, 25 bp, Homo sapiens
gaagcagttagctgtcgcctctcca

SEQ ID NO: 3277 - DNA, 25 bp, Homo sapiens
aagcagttagctgtcgcctctccag

SEQ ID NO: 3278 - DNA, 25 bp, Homo sapiens
agcagttagctgtcgcctctccaga

SEQ ID NO: 3279 - DNA, 25 bp, Homo sapiens
gcagttagctgtcgcctctccagaa

SEQ ID NO: 3280 - DNA, 25 bp, Homo sapiens
cagttagctgtcgcctctccagaac

SEQ ID NO: 3281 - DNA, 25 bp, Homo sapiens
agttagctgtcgcctctccagaacg

SEQ ID NO: 3282 - DNA, 25 bp, Homo sapiens
gttagctgtcgcctctccagaacga

SEQ ID NO: 3283 - DNA, 25 bp, Homo sapiens
ttagctgtcgcctctccagaacgag

SEQ ID NO: 3284 - DNA, 25 bp, Homo sapiens
tagctgtcgcctctccagaacgaga

SEQ ID NO: 3285 - DNA, 25 bp, Homo sapiens
agctgtcgcctctccagaacgagag

SEQ ID NO: 3286 - DNA, 25 bp, Homo sapiens
gctgtcgcctctccagaacgagaga

SEQ ID NO: 3287 - DNA, 25 bp, Homo sapiens
ctgtcgcctctccagaacgagagat

SEQ ID NO: 3288 - DNA, 25 bp, Homo sapiens
tgtcgcctctccagaacgagagatc

SEQ ID NO: 3289 - DNA, 25 bp, Homo sapiens
gtcgcctctccagaacgagagatcc

SEQ ID NO: 3290 - DNA, 25 bp, Homo sapiens
tcgcctctccagaacgagagatccc

SEQ ID NO: 3291 - DNA, 25 bp, Homo sapiens
cgcctctccagaacgagagatccca

SEQ ID NO: 3292 - DNA, 25 bp, Homo sapiens
gcctctccagaacgagagatcccag

SEQ ID NO: 3293 - DNA, 25 bp, Homo sapiens
cctctccagaacgagagatcccaga

SEQ ID NO: 3294 - DNA, 25 bp, Homo sapiens
ctctccagaacgagagatcccagaa

SEQ ID NO: 3295 - DNA, 25 bp, Homo sapiens
tctccagaacgagagatcccagaaa

SEQ ID NO: 3296 - DNA, 25 bp, Homo sapiens
ctccagaacgagagatcccagaaat

SEQ ID NO: 3297 - DNA, 25 bp, Homo sapiens
tccagaacgagagatcccagaaatt

SEQ ID NO: 3298 - DNA, 25 bp, Homo sapiens
ccagaacgagagatcccagaaattt

SEQ ID NO: 3299 - DNA, 25 bp, Homo sapiens
cagaacgagagatcccagaaatttc

SEQ ID NO: 3300 - DNA, 25 bp, Homo sapiens
agaacgagagatcccagaaatttcc

SEQ ID NO: 3301 - DNA, 25 bp, Homo sapiens
gaacgagagatcccagaaatttcca

SEQ ID NO: 3302 - DNA, 25 bp, Homo sapiens
aacgagagatcccagaaatttccat

SEQ ID NO: 3303 - DNA, 25 bp, Homo sapiens
acgagagatcccagaaatttccatc

SEQ ID NO: 3304 - DNA, 25 bp, Homo sapiens
cgagagatcccagaaatttccatca

SEQ ID NO: 3305 - DNA, 25 bp, Homo sapiens
gagagatcccagaaatttccatcag

SEQ ID NO: 3306 - DNA, 25 bp, Homo sapiens
agagatcccagaaatttccatcagc

SEQ ID NO: 3307 - DNA, 25 bp, Homo sapiens
gagatcccagaaatttccatcagcc

SEQ ID NO: 3308 - DNA, 25 bp, Homo sapiens
agatcccagaaatttccatcagcca

SEQ ID NO: 3309 - DNA, 25 bp, Homo sapiens
gatcccagaaatttccatcagccaa

SEQ ID NO: 3310 - DNA, 25 bp, Homo sapiens
atcccagaaatttccatcagccaac

SEQ ID NO: 3311 - DNA, 25 bp, Homo sapiens
tcccagaaatttccatcagccaacc

SEQ ID NO: 3312 - DNA, 25 bp, Homo sapiens
cccagaaatttccatcagccaaccc

SEQ ID NO: 3313 - DNA, 25 bp, Homo sapiens
ccagaaatttccatcagccaaccca

SEQ ID NO: 3314 - DNA, 25 bp, Homo sapiens
cagaaatttccatcagccaacccaa

SEQ ID NO: 3315 - DNA, 25 bp, Homo sapiens
agaaatttccatcagccaacccaac

SEQ ID NO: 3316 - DNA, 25 bp, Homo sapiens
gaaatttccatcagccaacccaaca

SEQ ID NO: 3317 - DNA, 25 bp, Homo sapiens
aaatttccatcagccaacccaacag

SEQ ID NO: 3318 - DNA, 25 bp, Homo sapiens
aatttccatcagccaacccaacagc

SEQ ID NO: 3319 - DNA, 25 bp, Homo sapiens
atttccatcagccaacccaacagca

SEQ ID NO: 3320 - DNA, 25 bp, Homo sapiens
tttccatcagccaacccaacagcaa

SEQ ID NO: 3321 - DNA, 25 bp, Homo sapiens
ttccatcagccaacccaacagcaag

SEQ ID NO: 3322 - DNA, 25 bp, Homo sapiens
tccatcagccaacccaacagcaagt

SEQ ID NO: 3323 - DNA, 25 bp, Homo sapiens
ccatcagccaacccaacagcaagtc

SEQ ID NO: 3324 - DNA, 25 bp, Homo sapiens
catcagccaacccaacagcaagtcc

SEQ ID NO: 3325 - DNA, 25 bp, Homo sapiens
atcagccaacccaacagcaagtcca

SEQ ID NO: 3326 - DNA, 25 bp, Homo sapiens
tcagccaacccaacagcaagtccag

SEQ ID NO: 3327 - DNA, 25 bp, Homo sapiens
cagccaacccaacagcaagtccagc

SEQ ID NO: 3328 - DNA, 25 bp, Homo sapiens
agccaacccaacagcaagtccagca

SEQ ID NO: 3329 - DNA, 25 bp, Homo sapiens
gccaacccaacagcaagtccagcag

SEQ ID NO: 3330 - DNA, 25 bp, Homo sapiens
ccaacccaacagcaagtccagcagt

SEQ ID NO: 3331 - DNA, 25 bp, Homo sapiens
caacccaacagcaagtccagcagtg

SEQ ID NO: 3332 - DNA, 25 bp, Homo sapiens
aacccaacagcaagtccagcagtgg

SEQ ID NO: 3333 - DNA, 25 bp, Homo sapiens
acccaacagcaagtccagcagtggc

SEQ ID NO: 3334 - DNA, 25 bp, Homo sapiens
cccaacagcaagtccagcagtggca

SEQ ID NO: 3335 - DNA, 25 bp, Homo sapiens
ccaacagcaagtccagcagtggcac

SEQ ID NO: 3336 - DNA, 25 bp, Homo sapiens
caacagcaagtccagcagtggcacc

SEQ ID NO: 3337 - DNA, 25 bp, Homo sapiens
aacagcaagtccagcagtggcacca

SEQ ID NO: 3338 - DNA, 25 bp, Homo sapiens
acagcaagtccagcagtggcaccag

SEQ ID NO: 3339 - DNA, 25 bp, Homo sapiens
cagcaagtccagcagtggcaccaga

SEQ ID NO: 3340 - DNA, 25 bp, Homo sapiens
agcaagtccagcagtggcaccagat

SEQ ID NO: 3341 - DNA, 25 bp, Homo sapiens
gcaagtccagcagtggcaccagatc

SEQ ID NO: 3342 - DNA, 25 bp, Homo sapiens
caagtccagcagtggcaccagatct

SEQ ID NO: 3343 - DNA, 25 bp, Homo sapiens
aagtccagcagtggcaccagatctg

SEQ ID NO: 3344 - DNA, 25 bp, Homo sapiens
agtccagcagtggcaccagatctgg

SEQ ID NO: 3345 - DNA, 25 bp, Homo sapiens
gtccagcagtggcaccagatctgga

SEQ ID NO: 3346 - DNA, 25 bp, Homo sapiens
tccagcagtggcaccagatctggaa

SEQ ID NO: 3347 - DNA, 25 bp, Homo sapiens
ccagcagtggcaccagatctggaag

SEQ ID NO: 3348 - DNA, 25 bp, Homo sapiens
cagcagtggcaccagatctggaagc

SEQ ID NO: 3349 - DNA, 25 bp, Homo sapiens
agcagtggcaccagatctggaagcc

SEQ ID NO: 3350 - DNA, 25 bp, Homo sapiens
gcagtggcaccagatctggaagcca

SEQ ID NO: 3351 - DNA, 25 bp, Homo sapiens
cagtggcaccagatctggaagccag

SEQ ID NO: 3352 - DNA, 25 bp, Homo sapiens
agtggcaccagatctggaagccagc

SEQ ID NO: 3353 - DNA, 25 bp, Homo sapiens
gtggcaccagatctggaagccagca

SEQ ID NO: 3354 - DNA, 25 bp, Homo sapiens
tggcaccagatctggaagccagcag

SEQ ID NO: 3355 - DNA, 25 bp, Homo sapiens
ggcaccagatctggaagccagcaga

SEQ ID NO: 3356 - DNA, 25 bp, Homo sapiens
gcaccagatctggaagccagcagat

SEQ ID NO: 3357 - DNA, 25 bp, Homo sapiens
caccagatctggaagccagcagatc

SEQ ID NO: 3358 - DNA, 25 bp, Homo sapiens
accagatctggaagccagcagatct

SEQ ID NO: 3359 - DNA, 25 bp, Homo sapiens
ccagatctggaagccagcagatctc

SEQ ID NO: 3360 - DNA, 25 bp, Homo sapiens
cagatctggaagccagcagatctct

SEQ ID NO: 3361 - DNA, 25 bp, Homo sapiens
agatctggaagccagcagatctctc

SEQ ID NO: 3362 - DNA, 25 bp, Homo sapiens
gatctggaagccagcagatctctca

SEQ ID NO: 3363 - DNA, 25 bp, Homo sapiens
atctggaagccagcagatctctcag

SEQ ID NO: 3364 - DNA, 25 bp, Homo sapiens
tctggaagccagcagatctctcagg

SEQ ID NO: 3365 - DNA, 25 bp, Homo sapiens
ctggaagccagcagatctctcagga

SEQ ID NO: 3366 - DNA, 25 bp, Homo sapiens
tggaagccagcagatctctcaggac

SEQ ID NO: 3367 - DNA, 25 bp, Homo sapiens
ggaagccagcagatctctcaggacg

SEQ ID NO: 3368 - DNA, 25 bp, Homo sapiens
gaagccagcagatctctcaggacga

SEQ ID NO: 3369 - DNA, 25 bp, Homo sapiens
aagccagcagatctctcaggacgac

SEQ ID NO: 3370 - DNA, 25 bp, Homo sapiens
agccagcagatctctcaggacgacc

SEQ ID NO: 3371 - DNA, 25 bp, Homo sapiens
gccagcagatctctcaggacgacca

SEQ ID NO: 3372 - DNA, 25 bp, Homo sapiens
ccagcagatctctcaggacgaccag

SEQ ID NO: 3373 - DNA, 25 bp, Homo sapiens
cagcagatctctcaggacgaccagt

SEQ ID NO: 3374 - DNA, 25 bp, Homo sapiens
agcagatctctcaggacgaccagtc

SEQ ID NO: 3375 - DNA, 25 bp, Homo sapiens
gcagatctctcaggacgaccagtca

SEQ ID NO: 3376 - DNA, 25 bp, Homo sapiens
cagatctctcaggacgaccagtcaa

SEQ ID NO: 3377 - DNA, 25 bp, Homo sapiens
agatctctcaggacgaccagtcaag

SEQ ID NO: 3378 - DNA, 25 bp, Homo sapiens
gatctctcaggacgaccagtcaagc

SEQ ID NO: 3379 - DNA, 25 bp, Homo sapiens
atctctcaggacgaccagtcaagct

SEQ ID NO: 3380 - DNA, 25 bp, Homo sapiens
tctctcaggacgaccagtcaagctc

SEQ ID NO: 3381 - DNA, 25 bp, Homo sapiens
ctctcaggacgaccagtcaagctct

SEQ ID NO: 3382 - DNA, 25 bp, Homo sapiens
tctcaggacgaccagtcaagctctc

SEQ ID NO: 3383 - DNA, 25 bp, Homo sapiens
ctcaggacgaccagtcaagctctcc

SEQ ID NO: 3384 - DNA, 25 bp, Homo sapiens
tcaggacgaccagtcaagctctcct

SEQ ID NO: 3385 - DNA, 25 bp, Homo sapiens
caggacgaccagtcaagctctcctg

SEQ ID NO: 3386 - DNA, 25 bp, Homo sapiens
aggacgaccagtcaagctctcctgg

SEQ ID NO: 3387 - DNA, 25 bp, Homo sapiens
ggacgaccagtcaagctctcctggg

SEQ ID NO: 3388 - DNA, 25 bp, Homo sapiens
gacgaccagtcaagctctcctggga

SEQ ID NO: 3389 - DNA, 25 bp, Homo sapiens
acgaccagtcaagctctcctgggag

SEQ ID NO: 3390 - DNA, 25 bp, Homo sapiens
cgaccagtcaagctctcctgggagc

SEQ ID NO: 3391 - DNA, 25 bp, Homo sapiens
gaccagtcaagctctcctgggagct

SEQ ID NO: 3392 - DNA, 25 bp, Homo sapiens
accagtcaagctctcctgggagctc

SEQ ID NO: 3393 - DNA, 25 bp, Homo sapiens
ccagtcaagctctcctgggagctca

SEQ ID NO: 3394 - DNA, 25 bp, Homo sapiens
cagtcaagctctcctgggagctcag

SEQ ID NO: 3395 - DNA, 25 bp, Homo sapiens
agtcaagctctcctgggagctcaga

SEQ ID NO: 3396 - DNA, 25 bp, Homo sapiens
gtcaagctctcctgggagctcagac

SEQ ID NO: 3397 - DNA, 25 bp, Homo sapiens
tcaagctctcctgggagctcagaca

SEQ ID NO: 3398 - DNA, 25 bp, Homo sapiens
caagctctcctgggagctcagacat

SEQ ID NO: 3399 - DNA, 25 bp, Homo sapiens
aagctctcctgggagctcagacatt

SEQ ID NO: 3400 - DNA, 25 bp, Homo sapiens
agctctcctgggagctcagacattc

SEQ ID NO: 3401 - DNA, 25 bp, Homo sapiens
gctctcctgggagctcagacattct

SEQ ID NO: 3402 - DNA, 25 bp, Homo sapiens
ctctcctgggagctcagacattctg

SEQ ID NO: 3403 - DNA, 25 bp, Homo sapiens
tctcctgggagctcagacattctgg

SEQ ID NO: 3404 - DNA, 25 bp, Homo sapiens
ctcctgggagctcagacattctggg

SEQ ID NO: 3405 - DNA, 25 bp, Homo sapiens
tcctgggagctcagacattctgggc

SEQ ID NO: 3406 - DNA, 25 bp, Homo sapiens
cctgggagctcagacattctgggca

SEQ ID NO: 3407 - DNA, 25 bp, Homo sapiens
ctgggagctcagacattctgggcaa

SEQ ID NO: 3408 - DNA, 25 bp, Homo sapiens
tgggagctcagacattctgggcaag

SEQ ID NO: 3409 - DNA, 25 bp, Homo sapiens
gggagctcagacattctgggcaagg

SEQ ID NO: 3410 - DNA, 25 bp, Homo sapiens
ggagctcagacattctgggcaagga

SEQ ID NO: 3411 - DNA, 25 bp, Homo sapiens
gagctcagacattctgggcaaggag

SEQ ID NO: 3412 - DNA, 25 bp, Homo sapiens
agctcagacattctgggcaaggaga

SEQ ID NO: 3413 - DNA, 25 bp, Homo sapiens
gctcagacattctgggcaaggagag

SEQ ID NO: 3414 - DNA, 25 bp, Homo sapiens
ctcagacattctgggcaaggagagc

SEQ ID NO: 3415 - DNA, 25 bp, Homo sapiens
tcagacattctgggcaaggagagcg

SEQ ID NO: 3416 - DNA, 25 bp, Homo sapiens
cagacattctgggcaaggagagcga

SEQ ID NO: 3417 - DNA, 25 bp, Homo sapiens
agacattctgggcaaggagagcgag

SEQ ID NO: 3418 - DNA, 25 bp, Homo sapiens
gacattctgggcaaggagagcgagg

SEQ ID NO: 3419 - DNA, 25 bp, Homo sapiens
acattctgggcaaggagagcgaggg

SEQ ID NO: 3420 - DNA, 25 bp, Homo sapiens
cattctgggcaaggagagcgagggg

SEQ ID NO: 3421 - DNA, 25 bp, Homo sapiens
attctgggcaaggagagcgaggggt

SEQ ID NO: 3422 - DNA, 25 bp, Homo sapiens
ttctgggcaaggagagcgaggggtc

SEQ ID NO: 3423 - DNA, 25 bp, Homo sapiens
tctgggcaaggagagcgaggggtcc

SEQ ID NO: 3424 - DNA, 25 bp, Homo sapiens
ctgggcaaggagagcgaggggtccc

SEQ ID NO: 3425 - DNA, 25 bp, Homo sapiens
tgggcaaggagagcgaggggtcccg

SEQ ID NO: 3426 - DNA, 25 bp, Homo sapiens
gggcaaggagagcgaggggtcccgc

SEQ ID NO: 3427 - DNA, 25 bp, Homo sapiens
ggcaaggagagcgaggggtcccgca

SEQ ID NO: 3428 - DNA, 25 bp, Homo sapiens
gcaaggagagcgaggggtcccgcag

SEQ ID NO: 3429 - DNA, 25 bp, Homo sapiens
caaggagagcgaggggtcccgcagc

SEQ ID NO: 3430 - DNA, 25 bp, Homo sapiens
aaggagagcgaggggtcccgcagcc

SEQ ID NO: 3431 - DNA, 25 bp, Homo sapiens
aggagagcgaggggtcccgcagccc

SEQ ID NO: 3432 - DNA, 25 bp, Homo sapiens
ggagagcgaggggtcccgcagcccc

SEQ ID NO: 3433 - DNA, 25 bp, Homo sapiens
gagagcgaggggtcccgcagccccg

SEQ ID NO: 3434 - DNA, 25 bp, Homo sapiens
agagcgaggggtcccgcagccccga

SEQ ID NO: 3435 - DNA, 25 bp, Homo sapiens
gagcgaggggtcccgcagccccgac

SEQ ID NO: 3436 - DNA, 25 bp, Homo sapiens
agcgaggggtcccgcagccccgacc

SEQ ID NO: 3437 - DNA, 25 bp, Homo sapiens
gcgaggggtcccgcagccccgaccc

SEQ ID NO: 3438 - DNA, 25 bp, Homo sapiens
cgaggggtcccgcagccccgaccct

SEQ ID NO: 3439 - DNA, 25 bp, Homo sapiens
gaggggtcccgcagccccgaccctg

SEQ ID NO: 3440 - DNA, 25 bp, Homo sapiens
aggggtcccgcagccccgaccctga

SEQ ID NO: 3441 - DNA, 25 bp, Homo sapiens
ggggtcccgcagccccgaccctgag

SEQ ID NO: 3442 - DNA, 25 bp, Homo sapiens
gggtcccgcagccccgaccctgagc

SEQ ID NO: 3443 - DNA, 25 bp, Homo sapiens
ggtcccgcagccccgaccctgagca

SEQ ID NO: 3444 - DNA, 25 bp, Homo sapiens
gtcccgcagccccgaccctgagcag

SEQ ID NO: 3445 - DNA, 25 bp, Homo sapiens
tcccgcagccccgaccctgagcaga

SEQ ID NO: 3446 - DNA, 25 bp, Homo sapiens
cccgcagccccgaccctgagcagat

SEQ ID NO: 3447 - DNA, 25 bp, Homo sapiens
ccgcagccccgaccctgagcagatg

SEQ ID NO: 3448 - DNA, 25 bp, Homo sapiens
cgcagccccgaccctgagcagatga

SEQ ID NO: 3449 - DNA, 25 bp, Homo sapiens
gcagccccgaccctgagcagatgac

SEQ ID NO: 3450 - DNA, 25 bp, Homo sapiens
cagccccgaccctgagcagatgaca

SEQ ID NO: 3451 - DNA, 25 bp, Homo sapiens
agccccgaccctgagcagatgacaa

SEQ ID NO: 3452 - DNA, 25 bp, Homo sapiens
gccccgaccctgagcagatgacaag

SEQ ID NO: 3453 - DNA, 25 bp, Homo sapiens
ccccgaccctgagcagatgacaagc

SEQ ID NO: 3454 - DNA, 25 bp, Homo sapiens
cccgaccctgagcagatgacaagca

SEQ ID NO: 3455 - DNA, 25 bp, Homo sapiens
ccgaccctgagcagatgacaagcat

SEQ ID NO: 3456 - DNA, 25 bp, Homo sapiens
cgaccctgagcagatgacaagcatc

SEQ ID NO: 3457 - DNA, 25 bp, Homo sapiens
gaccctgagcagatgacaagcatca

SEQ ID NO: 3458 - DNA, 25 bp, Homo sapiens
accctgagcagatgacaagcatcaa

SEQ ID NO: 3459 - DNA, 25 bp, Homo sapiens
ccctgagcagatgacaagcatcaat

SEQ ID NO: 3460 - DNA, 25 bp, Homo sapiens
cctgagcagatgacaagcatcaatg

SEQ ID NO: 3461 - DNA, 25 bp, Homo sapiens
ctgagcagatgacaagcatcaatgg

SEQ ID NO: 3462 - DNA, 25 bp, Homo sapiens
tgagcagatgacaagcatcaatggt

SEQ ID NO: 3463 - DNA, 25 bp, Homo sapiens
gagcagatgacaagcatcaatggtg

SEQ ID NO: 3464 - DNA, 25 bp, Homo sapiens
agcagatgacaagcatcaatggtga

SEQ ID NO: 3465 - DNA, 25 bp, Homo sapiens
gcagatgacaagcatcaatggtgag

SEQ ID NO: 3466 - DNA, 25 bp, Homo sapiens
cagatgacaagcatcaatggtgaga

SEQ ID NO: 3467 - DNA, 25 bp, Homo sapiens
agatgacaagcatcaatggtgagaa

SEQ ID NO: 3468 - DNA, 25 bp, Homo sapiens
gatgacaagcatcaatggtgagaag

SEQ ID NO: 3469 - DNA, 25 bp, Homo sapiens
atgacaagcatcaatggtgagaagg

SEQ ID NO: 3470 - DNA, 25 bp, Homo sapiens
tgacaagcatcaatggtgagaaggc

SEQ ID NO: 3471 - DNA, 25 bp, Homo sapiens
gacaagcatcaatggtgagaaggcc

SEQ ID NO: 3472 - DNA, 25 bp, Homo sapiens
acaagcatcaatggtgagaaggccc

SEQ ID NO: 3473 - DNA, 25 bp, Homo sapiens
caagcatcaatggtgagaaggccca

SEQ ID NO: 3474 - DNA, 25 bp, Homo sapiens
aagcatcaatggtgagaaggcccag

SEQ ID NO: 3475 - DNA, 25 bp, Homo sapiens
agcatcaatggtgagaaggcccagg

SEQ ID NO: 3476 - DNA, 25 bp, Homo sapiens
gcatcaatggtgagaaggcccagga

SEQ ID NO: 3477 - DNA, 25 bp, Homo sapiens
catcaatggtgagaaggcccaggag

SEQ ID NO: 3478 - DNA, 25 bp, Homo sapiens
atcaatggtgagaaggcccaggagc

SEQ ID NO: 3479 - DNA, 25 bp, Homo sapiens
tcaatggtgagaaggcccaggagct

SEQ ID NO: 3480 - DNA, 25 bp, Homo sapiens
caatggtgagaaggcccaggagctg

SEQ ID NO: 3481 - DNA, 25 bp, Homo sapiens
aatggtgagaaggcccaggagctgg

SEQ ID NO: 3482 - DNA, 25 bp, Homo sapiens
atggtgagaaggcccaggagctggg

SEQ ID NO: 3483 - DNA, 25 bp, Homo sapiens
tggtgagaaggcccaggagctgggc

SEQ ID NO: 3484 - DNA, 25 bp, Homo sapiens
ggtgagaaggcccaggagctgggct

SEQ ID NO: 3485 - DNA, 25 bp, Homo sapiens
gtgagaaggcccaggagctgggctc

SEQ ID NO: 3486 - DNA, 25 bp, Homo sapiens
tgagaaggcccaggagctgggctcc

SEQ ID NO: 3487 - DNA, 25 bp, Homo sapiens
gagaaggcccaggagctgggctcca

SEQ ID NO: 3488 - DNA, 25 bp, Homo sapiens
agaaggcccaggagctgggctccag

SEQ ID NO: 3489 - DNA, 25 bp, Homo sapiens
gaaggcccaggagctgggctccagt

SEQ ID NO: 3490 - DNA, 25 bp, Homo sapiens
aaggcccaggagctgggctccagtg

SEQ ID NO: 3491 - DNA, 25 bp, Homo sapiens
aggcccaggagctgggctccagtgc

SEQ ID NO: 3492 - DNA, 25 bp, Homo sapiens
ggcccaggagctgggctccagtgcg

SEQ ID NO: 3493 - DNA, 25 bp, Homo sapiens
gcccaggagctgggctccagtgcga

SEQ ID NO: 3494 - DNA, 25 bp, Homo sapiens
cccaggagctgggctccagtgcgac

SEQ ID NO: 3495 - DNA, 25 bp, Homo sapiens
ccaggagctgggctccagtgcgaca

SEQ ID NO: 3496 - DNA, 25 bp, Homo sapiens
caggagctgggctccagtgcgacac

SEQ ID NO: 3497 - DNA, 25 bp, Homo sapiens
aggagctgggctccagtgcgacacc

SEQ ID NO: 3498 - DNA, 25 bp, Homo sapiens
ggagctgggctccagtgcgacacca

SEQ ID NO: 3499 - DNA, 25 bp, Homo sapiens
gagctgggctccagtgcgacaccaa

SEQ ID NO: 3500 - DNA, 25 bp, Homo sapiens
agctgggctccagtgcgacaccaac

SEQ ID NO: 3501 - DNA, 25 bp, Homo sapiens
gctgggctccagtgcgacaccaacc

SEQ ID NO: 3502 - DNA, 25 bp, Homo sapiens
ctgggctccagtgcgacaccaacca

SEQ ID NO: 3503 - DNA, 25 bp, Homo sapiens
tgggctccagtgcgacaccaaccaa

SEQ ID NO: 3504 - DNA, 25 bp, Homo sapiens
gggctccagtgcgacaccaaccaaa

SEQ ID NO: 3505 - DNA, 25 bp, Homo sapiens
ggctccagtgcgacaccaaccaaaa

SEQ ID NO: 3506 - DNA, 25 bp, Homo sapiens
gctccagtgcgacaccaaccaaaaa

SEQ ID NO: 3507 - DNA, 25 bp, Homo sapiens
ctccagtgcgacaccaaccaaaaag

SEQ ID NO: 3508 - DNA, 25 bp, Homo sapiens
tccagtgcgacaccaaccaaaaaga

SEQ ID NO: 3509 - DNA, 25 bp, Homo sapiens
ccagtgcgacaccaaccaaaaagac

SEQ ID NO: 3510 - DNA, 25 bp, Homo sapiens
cagtgcgacaccaaccaaaaagact

SEQ ID NO: 3511 - DNA, 25 bp, Homo sapiens
agtgcgacaccaaccaaaaagactg

SEQ ID NO: 3512 - DNA, 25 bp, Homo sapiens
gtgcgacaccaaccaaaaagactgt

SEQ ID NO: 3513 - DNA, 25 bp, Homo sapiens
tgcgacaccaaccaaaaagactgtc

SEQ ID NO: 3514 - DNA, 25 bp, Homo sapiens
gcgacaccaaccaaaaagactgtcc

SEQ ID NO: 3515 - DNA, 25 bp, Homo sapiens
cgacaccaaccaaaaagactgtccc

SEQ ID NO: 3516 - DNA, 25 bp, Homo sapiens
gacaccaaccaaaaagactgtcccc

SEQ ID NO: 3517 - DNA, 25 bp, Homo sapiens
acaccaaccaaaaagactgtcccct

SEQ ID NO: 3518 - DNA, 25 bp, Homo sapiens
caccaaccaaaaagactgtcccctt

SEQ ID NO: 3519 - DNA, 25 bp, Homo sapiens
accaaccaaaaagactgtccccttc

SEQ ID NO: 3520 - DNA, 25 bp, Homo sapiens
ccaaccaaaaagactgtccccttca

SEQ ID NO: 3521 - DNA, 25 bp, Homo sapiens
caaccaaaaagactgtccccttcaa

SEQ ID NO: 3522 - DNA, 25 bp, Homo sapiens
aaccaaaaagactgtccccttcaag

SEQ ID NO: 3523 - DNA, 25 bp, Homo sapiens
accaaaaagactgtccccttcaaga

SEQ ID NO: 3524 - DNA, 25 bp, Homo sapiens
ccaaaaagactgtccccttcaagag

SEQ ID NO: 3525 - DNA, 25 bp, Homo sapiens
caaaaagactgtccccttcaagagg

SEQ ID NO: 3526 - DNA, 25 bp, Homo sapiens
aaaaagactgtccccttcaagaggg

SEQ ID NO: 3527 - DNA, 25 bp, Homo sapiens
aaaagactgtccccttcaagagggg

SEQ ID NO: 3528 - DNA, 25 bp, Homo sapiens
aaagactgtccccttcaagaggggc

SEQ ID NO: 3529 - DNA, 25 bp, Homo sapiens
aagactgtccccttcaagaggggcg

SEQ ID NO: 3530 - DNA, 25 bp, Homo sapiens
agactgtccccttcaagaggggcgt

SEQ ID NO: 3531 - DNA, 25 bp, Homo sapiens
gactgtccccttcaagaggggcgtg

SEQ ID NO: 3532 - DNA, 25 bp, Homo sapiens
actgtccccttcaagaggggcgtga

SEQ ID NO: 3533 - DNA, 25 bp, Homo sapiens
ctgtccccttcaagaggggcgtgag

SEQ ID NO: 3534 - DNA, 25 bp, Homo sapiens
tgtccccttcaagaggggcgtgagg

SEQ ID NO: 3535 - DNA, 25 bp, Homo sapiens
gtccccttcaagaggggcgtgagga

SEQ ID NO: 3536 - DNA, 25 bp, Homo sapiens
tccccttcaagaggggcgtgaggag

SEQ ID NO: 3537 - DNA, 25 bp, Homo sapiens
ccccttcaagaggggcgtgaggagg

SEQ ID NO: 3538 - DNA, 25 bp, Homo sapiens
cccttcaagaggggcgtgaggaggg

SEQ ID NO: 3539 - DNA, 25 bp, Homo sapiens
ccttcaagaggggcgtgaggagggg

SEQ ID NO: 3540 - DNA, 25 bp, Homo sapiens
cttcaagaggggcgtgaggaggggt

SEQ ID NO: 3541 - DNA, 25 bp, Homo sapiens
ttcaagaggggcgtgaggaggggtg

SEQ ID NO: 3542 - DNA, 25 bp, Homo sapiens
tcaagaggggcgtgaggaggggtga

SEQ ID NO: 3543 - DNA, 25 bp, Homo sapiens
caagaggggcgtgaggaggggtgat

SEQ ID NO: 3544 - DNA, 25 bp, Homo sapiens
aagaggggcgtgaggaggggtgatg

SEQ ID NO: 3545 - DNA, 25 bp, Homo sapiens
agaggggcgtgaggaggggtgatgt

SEQ ID NO: 3546 - DNA, 25 bp, Homo sapiens
gaggggcgtgaggaggggtgatgtg

SEQ ID NO: 3547 - DNA, 25 bp, Homo sapiens
aggggcgtgaggaggggtgatgtgt

SEQ ID NO: 3548 - DNA, 25 bp, Homo sapiens
ggggcgtgaggaggggtgatgtgtt

SEQ ID NO: 3549 - DNA, 25 bp, Homo sapiens
gggcgtgaggaggggtgatgtgttg

SEQ ID NO: 3550 - DNA, 25 bp, Homo sapiens
ggcgtgaggaggggtgatgtgttgt

SEQ ID NO: 3551 - DNA, 25 bp, Homo sapiens
gcgtgaggaggggtgatgtgttgtt

SEQ ID NO: 3552 - DNA, 25 bp, Homo sapiens
cgtgaggaggggtgatgtgttgttg

SEQ ID NO: 3553 - DNA, 25 bp, Homo sapiens
gtgaggaggggtgatgtgttgttga

SEQ ID NO: 3554 - DNA, 25 bp, Homo sapiens
tgaggaggggtgatgtgttgttgat

SEQ ID NO: 3555 - DNA, 25 bp, Homo sapiens
gaggaggggtgatgtgttgttgatg

SEQ ID NO: 3556 - DNA, 25 bp, Homo sapiens
aggaggggtgatgtgttgttgatgg

SEQ ID NO: 3557 - DNA, 25 bp, Homo sapiens
ggaggggtgatgtgttgttgatggt

SEQ ID NO: 3558 - DNA, 25 bp, Homo sapiens
gaggggtgatgtgttgttgatggtg

SEQ ID NO: 3559 - DNA, 25 bp, Homo sapiens
aggggtgatgtgttgttgatggtgg

SEQ ID NO: 3560 - DNA, 25 bp, Homo sapiens
ggggtgatgtgttgttgatggtggc

SEQ ID NO: 3561 - DNA, 25 bp, Homo sapiens
gggtgatgtgttgttgatggtggcc

SEQ ID NO: 3562 - DNA, 25 bp, Homo sapiens
ggtgatgtgttgttgatggtggcca

SEQ ID NO: 3563 - DNA, 25 bp, Homo sapiens
gtgatgtgttgttgatggtggccaa

SEQ ID NO: 3564 - DNA, 25 bp, Homo sapiens
tgatgtgttgttgatggtggccaag

SEQ ID NO: 3565 - DNA, 25 bp, Homo sapiens
gatgtgttgttgatggtggccaagc

SEQ ID NO: 3566 - DNA, 25 bp, Homo sapiens
atgtgttgttgatggtggccaagct

SEQ ID NO: 3567 - DNA, 25 bp, Homo sapiens
tgtgttgttgatggtggccaagctg

SEQ ID NO: 3568 - DNA, 25 bp, Homo sapiens
gtgttgttgatggtggccaagctgg

SEQ ID NO: 3569 - DNA, 25 bp, Homo sapiens
tgttgttgatggtggccaagctgga

SEQ ID NO: 3570 - DNA, 25 bp, Homo sapiens
gttgttgatggtggccaagctggac

SEQ ID NO: 3571 - DNA, 25 bp, Homo sapiens
ttgttgatggtggccaagctggacc

SEQ ID NO: 3572 - DNA, 25 bp, Homo sapiens
tgttgatggtggccaagctggaccc

SEQ ID NO: 3573 - DNA, 25 bp, Homo sapiens
gttgatggtggccaagctggacccg

SEQ ID NO: 3574 - DNA, 25 bp, Homo sapiens
ttgatggtggccaagctggacccgg

SEQ ID NO: 3575 - DNA, 25 bp, Homo sapiens
tgatggtggccaagctggacccgga

SEQ ID NO: 3576 - DNA, 25 bp, Homo sapiens
gatggtggccaagctggacccggac

SEQ ID NO: 3577 - DNA, 25 bp, Homo sapiens
atggtggccaagctggacccggact

SEQ ID NO: 3578 - DNA, 25 bp, Homo sapiens
tggtggccaagctggacccggactc

SEQ ID NO: 3579 - DNA, 25 bp, Homo sapiens
ggtggccaagctggacccggactca

SEQ ID NO: 3580 - DNA, 25 bp, Homo sapiens
gtggccaagctggacccggactcag

SEQ ID NO: 3581 - DNA, 25 bp, Homo sapiens
tggccaagctggacccggactcagc

SEQ ID NO: 3582 - DNA, 25 bp, Homo sapiens
ggccaagctggacccggactcagcc

SEQ ID NO: 3583 - DNA, 25 bp, Homo sapiens
gccaagctggacccggactcagcca

SEQ ID NO: 3584 - DNA, 25 bp, Homo sapiens
ccaagctggacccggactcagccaa

SEQ ID NO: 3585 - DNA, 25 bp, Homo sapiens
caagctggacccggactcagccaag

SEQ ID NO: 3586 - DNA, 25 bp, Homo sapiens
aagctggacccggactcagccaagc

SEQ ID NO: 3587 - DNA, 25 bp, Homo sapiens
agctggacccggactcagccaagcc

SEQ ID NO: 3588 - DNA, 25 bp, Homo sapiens
gctggacccggactcagccaagcca

SEQ ID NO: 3589 - DNA, 25 bp, Homo sapiens
ctggacccggactcagccaagccag

SEQ ID NO: 3590 - DNA, 25 bp, Homo sapiens
tggacccggactcagccaagccaga

SEQ ID NO: 3591 - DNA, 25 bp, Homo sapiens
ggacccggactcagccaagccagag

SEQ ID NO: 3592 - DNA, 25 bp, Homo sapiens
gacccggactcagccaagccagaga

SEQ ID NO: 3593 - DNA, 25 bp, Homo sapiens
acccggactcagccaagccagagaa

SEQ ID NO: 3594 - DNA, 25 bp, Homo sapiens
cccggactcagccaagccagagaag

SEQ ID NO: 3595 - DNA, 25 bp, Homo sapiens
ccggactcagccaagccagagaaga

SEQ ID NO: 3596 - DNA, 25 bp, Homo sapiens
cggactcagccaagccagagaagac

SEQ ID NO: 3597 - DNA, 25 bp, Homo sapiens
ggactcagccaagccagagaagact

SEQ ID NO: 3598 - DNA, 25 bp, Homo sapiens
gactcagccaagccagagaagactc

SEQ ID NO: 3599 - DNA, 25 bp, Homo sapiens
actcagccaagccagagaagactca

SEQ ID NO: 3600 - DNA, 25 bp, Homo sapiens
ctcagccaagccagagaagactcat

SEQ ID NO: 3601 - DNA, 25 bp, Homo sapiens
tcagccaagccagagaagactcatc

SEQ ID NO: 3602 - DNA, 25 bp, Homo sapiens
cagccaagccagagaagactcatcc

SEQ ID NO: 3603 - DNA, 25 bp, Homo sapiens
agccaagccagagaagactcatccc

SEQ ID NO: 3604 - DNA, 25 bp, Homo sapiens
gccaagccagagaagactcatcccc

SEQ ID NO: 3605 - DNA, 25 bp, Homo sapiens
ccaagccagagaagactcatcccca

SEQ ID NO: 3606 - DNA, 25 bp, Homo sapiens
caagccagagaagactcatccccat

SEQ ID NO: 3607 - DNA, 25 bp, Homo sapiens
aagccagagaagactcatccccatg

SEQ ID NO: 3608 - DNA, 25 bp, Homo sapiens
agccagagaagactcatccccatga

SEQ ID NO: 3609 - DNA, 25 bp, Homo sapiens
gccagagaagactcatccccatgac

SEQ ID NO: 3610 - DNA, 25 bp, Homo sapiens
ccagagaagactcatccccatgacg

SEQ ID NO: 3611 - DNA, 25 bp, Homo sapiens
cagagaagactcatccccatgacgc

SEQ ID NO: 3612 - DNA, 25 bp, Homo sapiens
agagaagactcatccccatgacgcc

SEQ ID NO: 3613 - DNA, 25 bp, Homo sapiens
gagaagactcatccccatgacgccc

SEQ ID NO: 3614 - DNA, 25 bp, Homo sapiens
agaagactcatccccatgacgcccc

SEQ ID NO: 3615 - DNA, 25 bp, Homo sapiens
gaagactcatccccatgacgccccc

SEQ ID NO: 3616 - DNA, 25 bp, Homo sapiens
aagactcatccccatgacgcccccc

SEQ ID NO: 3617 - DNA, 25 bp, Homo sapiens
agactcatccccatgacgccccccc

SEQ ID NO: 3618 - DNA, 25 bp, Homo sapiens
gactcatccccatgacgccccccct

SEQ ID NO: 3619 - DNA, 25 bp, Homo sapiens
actcatccccatgacgccccccctt

SEQ ID NO: 3620 - DNA, 25 bp, Homo sapiens
ctcatccccatgacgcccccccttg

SEQ ID NO: 3621 - DNA, 25 bp, Homo sapiens
tcatccccatgacgcccccccttgc

SEQ ID NO: 3622 - DNA, 25 bp, Homo sapiens
catccccatgacgcccccccttgca

SEQ ID NO: 3623 - DNA, 25 bp, Homo sapiens
atccccatgacgcccccccttgcaa

SEQ ID NO: 3624 - DNA, 25 bp, Homo sapiens
tccccatgacgcccccccttgcaag

SEQ ID NO: 3625 - DNA, 25 bp, Homo sapiens
ccccatgacgcccccccttgcaaga

SEQ ID NO: 3626 - DNA, 25 bp, Homo sapiens
cccatgacgcccccccttgcaagac

SEQ ID NO: 3627 - DNA, 25 bp, Homo sapiens
ccatgacgcccccccttgcaagacc

SEQ ID NO: 3628 - DNA, 25 bp, Homo sapiens
catgacgcccccccttgcaagacct

SEQ ID NO: 3629 - DNA, 25 bp, Homo sapiens
atgacgcccccccttgcaagacctc

SEQ ID NO: 3630 - DNA, 25 bp, Homo sapiens
tgacgcccccccttgcaagacctct

SEQ ID NO: 3631 - DNA, 25 bp, Homo sapiens
gacgcccccccttgcaagacctctc

SEQ ID NO: 3632 - DNA, 25 bp, Homo sapiens
acgcccccccttgcaagacctctcc

SEQ ID NO: 3633 - DNA, 25 bp, Homo sapiens
cgcccccccttgcaagacctctccc

SEQ ID NO: 3634 - DNA, 25 bp, Homo sapiens
gcccccccttgcaagacctctcccc

SEQ ID NO: 3635 - DNA, 25 bp, Homo sapiens
cccccccttgcaagacctctccccc

SEQ ID NO: 3636 - DNA, 25 bp, Homo sapiens
ccccccttgcaagacctctcccccc

SEQ ID NO: 3637 - DNA, 25 bp, Homo sapiens
cccccttgcaagacctctccccccg

SEQ ID NO: 3638 - DNA, 25 bp, Homo sapiens
ccccttgcaagacctctccccccgc

SEQ ID NO: 3639 - DNA, 25 bp, Homo sapiens
cccttgcaagacctctccccccgcc

SEQ ID NO: 3640 - DNA, 25 bp, Homo sapiens
ccttgcaagacctctccccccgcca

SEQ ID NO: 3641 - DNA, 25 bp, Homo sapiens
cttgcaagacctctccccccgccac

SEQ ID NO: 3642 - DNA, 25 bp, Homo sapiens
ttgcaagacctctccccccgccaca

SEQ ID NO: 3643 - DNA, 25 bp, Homo sapiens
tgcaagacctctccccccgccacag

SEQ ID NO: 3644 - DNA, 25 bp, Homo sapiens
gcaagacctctccccccgccacaga

SEQ ID NO: 3645 - DNA, 25 bp, Homo sapiens
caagacctctccccccgccacagat

SEQ ID NO: 3646 - DNA, 25 bp, Homo sapiens
aagacctctccccccgccacagata

SEQ ID NO: 3647 - DNA, 25 bp, Homo sapiens
agacctctccccccgccacagatac

SEQ ID NO: 3648 - DNA, 25 bp, Homo sapiens
gacctctccccccgccacagatact

SEQ ID NO: 3649 - DNA, 25 bp, Homo sapiens
acctctccccccgccacagatactg

SEQ ID NO: 3650 - DNA, 25 bp, Homo sapiens
cctctccccccgccacagatactgg

SEQ ID NO: 3651 - DNA, 25 bp, Homo sapiens
ctctccccccgccacagatactgga

SEQ ID NO: 3652 - DNA, 25 bp, Homo sapiens
tctccccccgccacagatactggaa

SEQ ID NO: 3653 - DNA, 25 bp, Homo sapiens
ctccccccgccacagatactggaaa

SEQ ID NO: 3654 - DNA, 25 bp, Homo sapiens
tccccccgccacagatactggaaag

SEQ ID NO: 3655 - DNA, 25 bp, Homo sapiens
ccccccgccacagatactggaaagg

SEQ ID NO: 3656 - DNA, 25 bp, Homo sapiens
cccccgccacagatactggaaagga

SEQ ID NO: 3657 - DNA, 25 bp, Homo sapiens
ccccgccacagatactggaaaggaa

SEQ ID NO: 3658 - DNA, 25 bp, Homo sapiens
cccgccacagatactggaaaggaaa

SEQ ID NO: 3659 - DNA, 25 bp, Homo sapiens
ccgccacagatactggaaaggaaaa

SEQ ID NO: 3660 - DNA, 25 bp, Homo sapiens
cgccacagatactggaaaggaaaag

SEQ ID NO: 3661 - DNA, 25 bp, Homo sapiens
gccacagatactggaaaggaaaaga

SEQ ID NO: 3662 - DNA, 25 bp, Homo sapiens
ccacagatactggaaaggaaaagaa

SEQ ID NO: 3663 - DNA, 25 bp, Homo sapiens
cacagatactggaaaggaaaagaaa

SEQ ID NO: 3664 - DNA, 25 bp, Homo sapiens
acagatactggaaaggaaaagaaag

SEQ ID NO: 3665 - DNA, 25 bp, Homo sapiens
cagatactggaaaggaaaagaaagg

SEQ ID NO: 3666 - DNA, 25 bp, Homo sapiens
agatactggaaaggaaaagaaaggg

SEQ ID NO: 3667 - DNA, 25 bp, Homo sapiens
gatactggaaaggaaaagaaagggg

SEQ ID NO: 3668 - DNA, 25 bp, Homo sapiens
atactggaaaggaaaagaaagggga

SEQ ID NO: 3669 - DNA, 25 bp, Homo sapiens
tactggaaaggaaaagaaaggggag

SEQ ID NO: 3670 - DNA, 25 bp, Homo sapiens
actggaaaggaaaagaaaggggaga

SEQ ID NO: 3671 - DNA, 25 bp, Homo sapiens
ctggaaaggaaaagaaaggggagac

SEQ ID NO: 3672 - DNA, 25 bp, Homo sapiens
tggaaaggaaaagaaaggggagacc

SEQ ID NO: 3673 - DNA, 25 bp, Homo sapiens
ggaaaggaaaagaaaggggagacct

SEQ ID NO: 3674 - DNA, 25 bp, Homo sapiens
gaaaggaaaagaaaggggagacctc

SEQ ID NO: 3675 - DNA, 25 bp, Homo sapiens
aaaggaaaagaaaggggagacctct

SEQ ID NO: 3676 - DNA, 25 bp, Homo sapiens
aaggaaaagaaaggggagacctcta

SEQ ID NO: 3677 - DNA, 25 bp, Homo sapiens
aggaaaagaaaggggagacctctag

SEQ ID NO: 3678 - DNA, 25 bp, Homo sapiens
ggaaaagaaaggggagacctctagg

SEQ ID NO: 3679 - DNA, 25 bp, Homo sapiens
gaaaagaaaggggagacctctagga

SEQ ID NO: 3680 - DNA, 25 bp, Homo sapiens
aaaagaaaggggagacctctaggac

SEQ ID NO: 3681 - DNA, 25 bp, Homo sapiens
aaagaaaggggagacctctaggact

SEQ ID NO: 3682 - DNA, 25 bp, Homo sapiens
aagaaaggggagacctctaggactc

SEQ ID NO: 3683 - DNA, 25 bp, Homo sapiens
agaaaggggagacctctaggactcc

SEQ ID NO: 3684 - DNA, 25 bp, Homo sapiens
gaaaggggagacctctaggactcct

SEQ ID NO: 3685 - DNA, 25 bp, Homo sapiens
aaaggggagacctctaggactcctt

SEQ ID NO: 3686 - DNA, 25 bp, Homo sapiens
aaggggagacctctaggactccttg

SEQ ID NO: 3687 - DNA, 25 bp, Homo sapiens
aggggagacctctaggactccttgt

SEQ ID NO: 3688 - DNA, 25 bp, Homo sapiens
ggggagacctctaggactccttgtg

SEQ ID NO: 3689 - DNA, 25 bp, Homo sapiens
gggagacctctaggactccttgtgg

SEQ ID NO: 3690 - DNA, 25 bp, Homo sapiens
ggagacctctaggactccttgtggc

SEQ ID NO: 3691 - DNA, 25 bp, Homo sapiens
gagacctctaggactccttgtggct

SEQ ID NO: 3692 - DNA, 25 bp, Homo sapiens
agacctctaggactccttgtggctc

SEQ ID NO: 3693 - DNA, 25 bp, Homo sapiens
gacctctaggactccttgtggctcc

SEQ ID NO: 3694 - DNA, 25 bp, Homo sapiens
acctctaggactccttgtggctccc

SEQ ID NO: 3695 - DNA, 25 bp, Homo sapiens
cctctaggactccttgtggctccca

SEQ ID NO: 3696 - DNA, 25 bp, Homo sapiens
ctctaggactccttgtggctcccag

SEQ ID NO: 3697 - DNA, 25 bp, Homo sapiens
tctaggactccttgtggctcccagg

SEQ ID NO: 3698 - DNA, 25 bp, Homo sapiens
ctaggactccttgtggctcccaggc

SEQ ID NO: 3699 - DNA, 25 bp, Homo sapiens
taggactccttgtggctcccaggcc

SEQ ID NO: 3700 - DNA, 25 bp, Homo sapiens
aggactccttgtggctcccaggcca

SEQ ID NO: 3701 - DNA, 25 bp, Homo sapiens
ggactccttgtggctcccaggccag

SEQ ID NO: 3702 - DNA, 25 bp, Homo sapiens
gactccttgtggctcccaggccagc

SEQ ID NO: 3703 - DNA, 25 bp, Homo sapiens
actccttgtggctcccaggccagca

SEQ ID NO: 3704 - DNA, 25 bp, Homo sapiens
ctccttgtggctcccaggccagcac

SEQ ID NO: 3705 - DNA, 25 bp, Homo sapiens
tccttgtggctcccaggccagcacc

SEQ ID NO: 3706 - DNA, 25 bp, Homo sapiens
ccttgtggctcccaggccagcaccg

SEQ ID NO: 3707 - DNA, 25 bp, Homo sapiens
cttgtggctcccaggccagcaccga

SEQ ID NO: 3708 - DNA, 25 bp, Homo sapiens
ttgtggctcccaggccagcaccgag

SEQ ID NO: 3709 - DNA, 25 bp, Homo sapiens
tgtggctcccaggccagcaccgaga

SEQ ID NO: 3710 - DNA, 25 bp, Homo sapiens
gtggctcccaggccagcaccgagat

SEQ ID NO: 3711 - DNA, 25 bp, Homo sapiens
tggctcccaggccagcaccgagatc

SEQ ID NO: 3712 - DNA, 25 bp, Homo sapiens
ggctcccaggccagcaccgagatct

SEQ ID NO: 3713 - DNA, 25 bp, Homo sapiens
gctcccaggccagcaccgagatctt

SEQ ID NO: 3714 - DNA, 25 bp, Homo sapiens
ctcccaggccagcaccgagatcttg

SEQ ID NO: 3715 - DNA, 25 bp, Homo sapiens
tcccaggccagcaccgagatcttgg

SEQ ID NO: 3716 - DNA, 25 bp, Homo sapiens
cccaggccagcaccgagatcttggc

SEQ ID NO: 3717 - DNA, 25 bp, Homo sapiens
ccaggccagcaccgagatcttggcc

SEQ ID NO: 3718 - DNA, 25 bp, Homo sapiens
caggccagcaccgagatcttggccc

SEQ ID NO: 3719 - DNA, 25 bp, Homo sapiens
aggccagcaccgagatcttggcccc

SEQ ID NO: 3720 - DNA, 25 bp, Homo sapiens
ggccagcaccgagatcttggccccg

SEQ ID NO: 3721 - DNA, 25 bp, Homo sapiens
gccagcaccgagatcttggccccga

SEQ ID NO: 3722 - DNA, 25 bp, Homo sapiens
ccagcaccgagatcttggccccgaa

SEQ ID NO: 3723 - DNA, 25 bp, Homo sapiens
cagcaccgagatcttggccccgaaa

SEQ ID NO: 3724 - DNA, 25 bp, Homo sapiens
agcaccgagatcttggccccgaaag

SEQ ID NO: 3725 - DNA, 25 bp, Homo sapiens
gcaccgagatcttggccccgaaagc

SEQ ID NO: 3726 - DNA, 25 bp, Homo sapiens
caccgagatcttggccccgaaagct

SEQ ID NO: 3727 - DNA, 25 bp, Homo sapiens
accgagatcttggccccgaaagctg

SEQ ID NO: 3728 - DNA, 25 bp, Homo sapiens
ccgagatcttggccccgaaagctga

SEQ ID NO: 3729 - DNA, 25 bp, Homo sapiens
cgagatcttggccccgaaagctgag

SEQ ID NO: 3730 - DNA, 25 bp, Homo sapiens
gagatcttggccccgaaagctgaga

SEQ ID NO: 3731 - DNA, 25 bp, Homo sapiens
agatcttggccccgaaagctgagaa

SEQ ID NO: 3732 - DNA, 25 bp, Homo sapiens
gatcttggccccgaaagctgagaag

SEQ ID NO: 3733 - DNA, 25 bp, Homo sapiens
atcttggccccgaaagctgagaaga

SEQ ID NO: 3734 - DNA, 25 bp, Homo sapiens
tcttggccccgaaagctgagaagac

SEQ ID NO: 3735 - DNA, 25 bp, Homo sapiens
cttggccccgaaagctgagaagacc

SEQ ID NO: 3736 - DNA, 25 bp, Homo sapiens
ttggccccgaaagctgagaagaccc

SEQ ID NO: 3737 - DNA, 25 bp, Homo sapiens
tggccccgaaagctgagaagacccg

SEQ ID NO: 3738 - DNA, 25 bp, Homo sapiens
ggccccgaaagctgagaagacccgg

SEQ ID NO: 3739 - DNA, 25 bp, Homo sapiens
gccccgaaagctgagaagacccgga

SEQ ID NO: 3740 - DNA, 25 bp, Homo sapiens
ccccgaaagctgagaagacccggac

SEQ ID NO: 3741 - DNA, 25 bp, Homo sapiens
cccgaaagctgagaagacccggact

SEQ ID NO: 3742 - DNA, 25 bp, Homo sapiens
ccgaaagctgagaagacccggactg

SEQ ID NO: 3743 - DNA, 25 bp, Homo sapiens
cgaaagctgagaagacccggactgg

SEQ ID NO: 3744 - DNA, 25 bp, Homo sapiens
gaaagctgagaagacccggactggg

SEQ ID NO: 3745 - DNA, 25 bp, Homo sapiens
aaagctgagaagacccggactgggg

SEQ ID NO: 3746 - DNA, 25 bp, Homo sapiens
aagctgagaagacccggactggggg

SEQ ID NO: 3747 - DNA, 25 bp, Homo sapiens
agctgagaagacccggactgggggt

SEQ ID NO: 3748 - DNA, 25 bp, Homo sapiens
gctgagaagacccggactgggggtc

SEQ ID NO: 3749 - DNA, 25 bp, Homo sapiens
ctgagaagacccggactgggggtct

SEQ ID NO: 3750 - DNA, 25 bp, Homo sapiens
tgagaagacccggactgggggtctt

SEQ ID NO: 3751 - DNA, 25 bp, Homo sapiens
gagaagacccggactgggggtcttg

SEQ ID NO: 3752 - DNA, 25 bp, Homo sapiens
agaagacccggactgggggtcttgg

SEQ ID NO: 3753 - DNA, 25 bp, Homo sapiens
gaagacccggactgggggtcttggg

SEQ ID NO: 3754 - DNA, 25 bp, Homo sapiens
aagacccggactgggggtcttgggg

SEQ ID NO: 3755 - DNA, 25 bp, Homo sapiens
agacccggactgggggtcttgggga

SEQ ID NO: 3756 - DNA, 25 bp, Homo sapiens
gacccggactgggggtcttggggac

SEQ ID NO: 3757 - DNA, 25 bp, Homo sapiens
acccggactgggggtcttggggacc

SEQ ID NO: 3758 - DNA, 25 bp, Homo sapiens
cccggactgggggtcttggggaccc

SEQ ID NO: 3759 - DNA, 25 bp, Homo sapiens
ccggactgggggtcttggggaccca

SEQ ID NO: 3760 - DNA, 25 bp, Homo sapiens
cggactgggggtcttggggacccag

SEQ ID NO: 3761 - DNA, 25 bp, Homo sapiens
ggactgggggtcttggggacccagg

SEQ ID NO: 3762 - DNA, 25 bp, Homo sapiens
gactgggggtcttggggacccaggc

SEQ ID NO: 3763 - DNA, 25 bp, Homo sapiens
actgggggtcttggggacccaggcc

SEQ ID NO: 3764 - DNA, 25 bp, Homo sapiens
ctgggggtcttggggacccaggcca

SEQ ID NO: 3765 - DNA, 25 bp, Homo sapiens
tgggggtcttggggacccaggccaa

SEQ ID NO: 3766 - DNA, 25 bp, Homo sapiens
gggggtcttggggacccaggccaag

SEQ ID NO: 3767 - DNA, 25 bp, Homo sapiens
ggggtcttggggacccaggccaagg

SEQ ID NO: 3768 - DNA, 25 bp, Homo sapiens
gggtcttggggacccaggccaagga

SEQ ID NO: 3769 - DNA, 25 bp, Homo sapiens
ggtcttggggacccaggccaaggaa

SEQ ID NO: 3770 - DNA, 25 bp, Homo sapiens
gtcttggggacccaggccaaggaac

SEQ ID NO: 3771 - DNA, 25 bp, Homo sapiens
tcttggggacccaggccaaggaact

SEQ ID NO: 3772 - DNA, 25 bp, Homo sapiens
cttggggacccaggccaaggaactg

SEQ ID NO: 3773 - DNA, 25 bp, Homo sapiens
ttggggacccaggccaaggaactgt

SEQ ID NO: 3774 - DNA, 25 bp, Homo sapiens
tggggacccaggccaaggaactgtg

SEQ ID NO: 3775 - DNA, 25 bp, Homo sapiens
ggggacccaggccaaggaactgtgg

SEQ ID NO: 3776 - DNA, 25 bp, Homo sapiens
gggacccaggccaaggaactgtggc

SEQ ID NO: 3777 - DNA, 25 bp, Homo sapiens
ggacccaggccaaggaactgtggca

SEQ ID NO: 3778 - DNA, 25 bp, Homo sapiens
gacccaggccaaggaactgtggcac

SEQ ID NO: 3779 - DNA, 25 bp, Homo sapiens
acccaggccaaggaactgtggcact

SEQ ID NO: 3780 - DNA, 25 bp, Homo sapiens
cccaggccaaggaactgtggcactg

SEQ ID NO: 3781 - DNA, 25 bp, Homo sapiens
ccaggccaaggaactgtggcactga

SEQ ID NO: 3782 - DNA, 25 bp, Homo sapiens
caggccaaggaactgtggcactgaa

SEQ ID NO: 3783 - DNA, 25 bp, Homo sapiens
aggccaaggaactgtggcactgaaa

SEQ ID NO: 3784 - DNA, 25 bp, Homo sapiens
ggccaaggaactgtggcactgaaaa

SEQ ID NO: 3785 - DNA, 25 bp, Homo sapiens
gccaaggaactgtggcactgaaaaa

SEQ ID NO: 3786 - DNA, 25 bp, Homo sapiens
ccaaggaactgtggcactgaaaaaa

SEQ ID NO: 3787 - DNA, 25 bp, Homo sapiens
caaggaactgtggcactgaaaaaag

SEQ ID NO: 3788 - DNA, 25 bp, Homo sapiens
aaggaactgtggcactgaaaaaagg

SEQ ID NO: 3789 - DNA, 25 bp, Homo sapiens
aggaactgtggcactgaaaaaaggc

SEQ ID NO: 3790 - DNA, 25 bp, Homo sapiens
ggaactgtggcactgaaaaaaggcg

SEQ ID NO: 3791 - DNA, 25 bp, Homo sapiens
gaactgtggcactgaaaaaaggcga

SEQ ID NO: 3792 - DNA, 25 bp, Homo sapiens
aactgtggcactgaaaaaaggcgag

SEQ ID NO: 3793 - DNA, 25 bp, Homo sapiens
actgtggcactgaaaaaaggcgagg

SEQ ID NO: 3794 - DNA, 25 bp, Homo sapiens
ctgtggcactgaaaaaaggcgagga

SEQ ID NO: 3795 - DNA, 25 bp, Homo sapiens
tgtggcactgaaaaaaggcgaggag

SEQ ID NO: 3796 - DNA, 25 bp, Homo sapiens
gtggcactgaaaaaaggcgaggagg

SEQ ID NO: 3797 - DNA, 25 bp, Homo sapiens
tggcactgaaaaaaggcgaggaggg

SEQ ID NO: 3798 - DNA, 25 bp, Homo sapiens
ggcactgaaaaaaggcgaggagggt

SEQ ID NO: 3799 - DNA, 25 bp, Homo sapiens
gcactgaaaaaaggcgaggagggtc

SEQ ID NO: 3800 - DNA, 25 bp, Homo sapiens
cactgaaaaaaggcgaggagggtca

SEQ ID NO: 3801 - DNA, 25 bp, Homo sapiens
actgaaaaaaggcgaggagggtcaa

SEQ ID NO: 3802 - DNA, 25 bp, Homo sapiens
ctgaaaaaaggcgaggagggtcaaa

SEQ ID NO: 3803 - DNA, 25 bp, Homo sapiens
tgaaaaaaggcgaggagggtcaaag

SEQ ID NO: 3804 - DNA, 25 bp, Homo sapiens
gaaaaaaggcgaggagggtcaaagc

SEQ ID NO: 3805 - DNA, 25 bp, Homo sapiens
aaaaaaggcgaggagggtcaaagca

SEQ ID NO: 3806 - DNA, 25 bp, Homo sapiens
aaaaaggcgaggagggtcaaagcat

SEQ ID NO: 3807 - DNA, 25 bp, Homo sapiens
aaaaggcgaggagggtcaaagcata

SEQ ID NO: 3808 - DNA, 25 bp, Homo sapiens
aaaggcgaggagggtcaaagcatag

SEQ ID NO: 3809 - DNA, 25 bp, Homo sapiens
aaggcgaggagggtcaaagcatagt

SEQ ID NO: 3810 - DNA, 25 bp, Homo sapiens
aggcgaggagggtcaaagcatagtg

SEQ ID NO: 3811 - DNA, 25 bp, Homo sapiens
ggcgaggagggtcaaagcatagtgg

SEQ ID NO: 3812 - DNA, 25 bp, Homo sapiens
gcgaggagggtcaaagcatagtggg

SEQ ID NO: 3813 - DNA, 25 bp, Homo sapiens
cgaggagggtcaaagcatagtgggg

SEQ ID NO: 3814 - DNA, 25 bp, Homo sapiens
gaggagggtcaaagcatagtgggga

SEQ ID NO: 3815 - DNA, 25 bp, Homo sapiens
aggagggtcaaagcatagtggggaa

SEQ ID NO: 3816 - DNA, 25 bp, Homo sapiens
ggagggtcaaagcatagtggggaag

SEQ ID NO: 3817 - DNA, 25 bp, Homo sapiens
gagggtcaaagcatagtggggaagg

SEQ ID NO: 3818 - DNA, 25 bp, Homo sapiens
agggtcaaagcatagtggggaaggg

SEQ ID NO: 3819 - DNA, 25 bp, Homo sapiens
gggtcaaagcatagtggggaagggg

SEQ ID NO: 3820 - DNA, 25 bp, Homo sapiens
ggtcaaagcatagtggggaaggggc

SEQ ID NO: 3821 - DNA, 25 bp, Homo sapiens
gtcaaagcatagtggggaaggggct

SEQ ID NO: 3822 - DNA, 25 bp, Homo sapiens
tcaaagcatagtggggaaggggctt

SEQ ID NO: 3823 - DNA, 25 bp, Homo sapiens
caaagcatagtggggaaggggcttg

SEQ ID NO: 3824 - DNA, 25 bp, Homo sapiens
aaagcatagtggggaaggggcttgg

SEQ ID NO: 3825 - DNA, 25 bp, Homo sapiens
aagcatagtggggaaggggcttggg

SEQ ID NO: 3826 - DNA, 25 bp, Homo sapiens
agcatagtggggaaggggcttggga

SEQ ID NO: 3827 - DNA, 25 bp, Homo sapiens
gcatagtggggaaggggcttgggac

SEQ ID NO: 3828 - DNA, 25 bp, Homo sapiens
catagtggggaaggggcttgggacc

SEQ ID NO: 3829 - DNA, 25 bp, Homo sapiens
atagtggggaaggggcttgggaccc

SEQ ID NO: 3830 - DNA, 25 bp, Homo sapiens
tagtggggaaggggcttgggacccc

SEQ ID NO: 3831 - DNA, 25 bp, Homo sapiens
agtggggaaggggcttgggaccccc

SEQ ID NO: 3832 - DNA, 25 bp, Homo sapiens
gtggggaaggggcttgggaccccca

SEQ ID NO: 3833 - DNA, 25 bp, Homo sapiens
tggggaaggggcttgggacccccaa

SEQ ID NO: 3834 - DNA, 25 bp, Homo sapiens
ggggaaggggcttgggacccccaag

SEQ ID NO: 3835 - DNA, 25 bp, Homo sapiens
gggaaggggcttgggacccccaaga

SEQ ID NO: 3836 - DNA, 25 bp, Homo sapiens
ggaaggggcttgggacccccaagac

SEQ ID NO: 3837 - DNA, 25 bp, Homo sapiens
gaaggggcttgggacccccaagacc

SEQ ID NO: 3838 - DNA, 25 bp, Homo sapiens
aaggggcttgggacccccaagacca

SEQ ID NO: 3839 - DNA, 25 bp, Homo sapiens
aggggcttgggacccccaagaccac

SEQ ID NO: 3840 - DNA, 25 bp, Homo sapiens
ggggcttgggacccccaagaccaca

SEQ ID NO: 3841 - DNA, 25 bp, Homo sapiens
gggcttgggacccccaagaccacag

SEQ ID NO: 3842 - DNA, 25 bp, Homo sapiens
ggcttgggacccccaagaccacaga

SEQ ID NO: 3843 - DNA, 25 bp, Homo sapiens
gcttgggacccccaagaccacagag

SEQ ID NO: 3844 - DNA, 25 bp, Homo sapiens
cttgggacccccaagaccacagagc

SEQ ID NO: 3845 - DNA, 25 bp, Homo sapiens
ttgggacccccaagaccacagagct

SEQ ID NO: 3846 - DNA, 25 bp, Homo sapiens
tgggacccccaagaccacagagctg

SEQ ID NO: 3847 - DNA, 25 bp, Homo sapiens
gggacccccaagaccacagagctga

SEQ ID NO: 3848 - DNA, 25 bp, Homo sapiens
ggacccccaagaccacagagctgaa

SEQ ID NO: 3849 - DNA, 25 bp, Homo sapiens
gacccccaagaccacagagctgaaa

SEQ ID NO: 3850 - DNA, 25 bp, Homo sapiens
acccccaagaccacagagctgaaag

SEQ ID NO: 3851 - DNA, 25 bp, Homo sapiens
cccccaagaccacagagctgaaaga

SEQ ID NO: 3852 - DNA, 25 bp, Homo sapiens
ccccaagaccacagagctgaaagag

SEQ ID NO: 3853 - DNA, 25 bp, Homo sapiens
cccaagaccacagagctgaaagagg

SEQ ID NO: 3854 - DNA, 25 bp, Homo sapiens
ccaagaccacagagctgaaagaggc

SEQ ID NO: 3855 - DNA, 25 bp, Homo sapiens
caagaccacagagctgaaagaggct

SEQ ID NO: 3856 - DNA, 25 bp, Homo sapiens
aagaccacagagctgaaagaggctg

SEQ ID NO: 3857 - DNA, 25 bp, Homo sapiens
agaccacagagctgaaagaggctga

SEQ ID NO: 3858 - DNA, 25 bp, Homo sapiens
gaccacagagctgaaagaggctgag

SEQ ID NO: 3859 - DNA, 25 bp, Homo sapiens
accacagagctgaaagaggctgagc

SEQ ID NO: 3860 - DNA, 25 bp, Homo sapiens
ccacagagctgaaagaggctgagcc

SEQ ID NO: 3861 - DNA, 25 bp, Homo sapiens
cacagagctgaaagaggctgagccc

SEQ ID NO: 3862 - DNA, 25 bp, Homo sapiens
acagagctgaaagaggctgagcccc

SEQ ID NO: 3863 - DNA, 25 bp, Homo sapiens
cagagctgaaagaggctgagcccca

SEQ ID NO: 3864 - DNA, 25 bp, Homo sapiens
agagctgaaagaggctgagccccag

SEQ ID NO: 3865 - DNA, 25 bp, Homo sapiens
gagctgaaagaggctgagccccagg

SEQ ID NO: 3866 - DNA, 25 bp, Homo sapiens
agctgaaagaggctgagccccaggg

SEQ ID NO: 3867 - DNA, 25 bp, Homo sapiens
gctgaaagaggctgagccccagggc

SEQ ID NO: 3868 - DNA, 25 bp, Homo sapiens
ctgaaagaggctgagccccagggca

SEQ ID NO: 3869 - DNA, 25 bp, Homo sapiens
tgaaagaggctgagccccagggcaa

SEQ ID NO: 3870 - DNA, 25 bp, Homo sapiens
gaaagaggctgagccccagggcaaa

SEQ ID NO: 3871 - DNA, 25 bp, Homo sapiens
aaagaggctgagccccagggcaaag

SEQ ID NO: 3872 - DNA, 25 bp, Homo sapiens
aagaggctgagccccagggcaaaga

SEQ ID NO: 3873 - DNA, 25 bp, Homo sapiens
agaggctgagccccagggcaaagac

SEQ ID NO: 3874 - DNA, 25 bp, Homo sapiens
gaggctgagccccagggcaaagaca

SEQ ID NO: 3875 - DNA, 25 bp, Homo sapiens
aggctgagccccagggcaaagacag

SEQ ID NO: 3876 - DNA, 25 bp, Homo sapiens
ggctgagccccagggcaaagacagg

SEQ ID NO: 3877 - DNA, 25 bp, Homo sapiens
gctgagccccagggcaaagacaggc

SEQ ID NO: 3878 - DNA, 25 bp, Homo sapiens
ctgagccccagggcaaagacaggca

SEQ ID NO: 3879 - DNA, 25 bp, Homo sapiens
tgagccccagggcaaagacaggcag

SEQ ID NO: 3880 - DNA, 25 bp, Homo sapiens
gagccccagggcaaagacaggcagg

SEQ ID NO: 3881 - DNA, 25 bp, Homo sapiens
agccccagggcaaagacaggcaggg

SEQ ID NO: 3882 - DNA, 25 bp, Homo sapiens
gccccagggcaaagacaggcagggg

SEQ ID NO: 3883 - DNA, 25 bp, Homo sapiens
ccccagggcaaagacaggcagggga

SEQ ID NO: 3884 - DNA, 25 bp, Homo sapiens
cccagggcaaagacaggcaggggac

SEQ ID NO: 3885 - DNA, 25 bp, Homo sapiens
ccagggcaaagacaggcaggggacc

SEQ ID NO: 3886 - DNA, 25 bp, Homo sapiens
cagggcaaagacaggcaggggacca

SEQ ID NO: 3887 - DNA, 25 bp, Homo sapiens
agggcaaagacaggcaggggaccag

SEQ ID NO: 3888 - DNA, 25 bp, Homo sapiens
gggcaaagacaggcaggggaccagg

SEQ ID NO: 3889 - DNA, 25 bp, Homo sapiens
ggcaaagacaggcaggggaccaggc

SEQ ID NO: 3890 - DNA, 25 bp, Homo sapiens
gcaaagacaggcaggggaccaggcc

SEQ ID NO: 3891 - DNA, 25 bp, Homo sapiens
caaagacaggcaggggaccaggccc

SEQ ID NO: 3892 - DNA, 25 bp, Homo sapiens
aaagacaggcaggggaccaggcccc

SEQ ID NO: 3893 - DNA, 25 bp, Homo sapiens
aagacaggcaggggaccaggcccca

SEQ ID NO: 3894 - DNA, 25 bp, Homo sapiens
agacaggcaggggaccaggccccaa

SEQ ID NO: 3895 - DNA, 25 bp, Homo sapiens
gacaggcaggggaccaggccccaag

SEQ ID NO: 3896 - DNA, 25 bp, Homo sapiens
acaggcaggggaccaggccccaagc

SEQ ID NO: 3897 - DNA, 25 bp, Homo sapiens
caggcaggggaccaggccccaagcc

SEQ ID NO: 3898 - DNA, 25 bp, Homo sapiens
aggcaggggaccaggccccaagccc

SEQ ID NO: 3899 - DNA, 25 bp, Homo sapiens
ggcaggggaccaggccccaagccca

SEQ ID NO: 3900 - DNA, 25 bp, Homo sapiens
gcaggggaccaggccccaagcccaa

SEQ ID NO: 3901 - DNA, 25 bp, Homo sapiens
caggggaccaggccccaagcccaag

SEQ ID NO: 3902 - DNA, 25 bp, Homo sapiens
aggggaccaggccccaagcccaagg

SEQ ID NO: 3903 - DNA, 25 bp, Homo sapiens
ggggaccaggccccaagcccaaggg

SEQ ID NO: 3904 - DNA, 25 bp, Homo sapiens
gggaccaggccccaagcccaagggc

SEQ ID NO: 3905 - DNA, 25 bp, Homo sapiens
ggaccaggccccaagcccaagggcc

SEQ ID NO: 3906 - DNA, 25 bp, Homo sapiens
gaccaggccccaagcccaagggccc

SEQ ID NO: 3907 - DNA, 25 bp, Homo sapiens
accaggccccaagcccaagggcccg

SEQ ID NO: 3908 - DNA, 25 bp, Homo sapiens
ccaggccccaagcccaagggcccgg

SEQ ID NO: 3909 - DNA, 25 bp, Homo sapiens
caggccccaagcccaagggcccggc

SEQ ID NO: 3910 - DNA, 25 bp, Homo sapiens
aggccccaagcccaagggcccggcg

SEQ ID NO: 3911 - DNA, 25 bp, Homo sapiens
ggccccaagcccaagggcccggcga

SEQ ID NO: 3912 - DNA, 25 bp, Homo sapiens
gccccaagcccaagggcccggcgag

SEQ ID NO: 3913 - DNA, 25 bp, Homo sapiens
ccccaagcccaagggcccggcgagg

SEQ ID NO: 3914 - DNA, 25 bp, Homo sapiens
cccaagcccaagggcccggcgaggg

SEQ ID NO: 3915 - DNA, 25 bp, Homo sapiens
ccaagcccaagggcccggcgagggg

SEQ ID NO: 3916 - DNA, 25 bp, Homo sapiens
caagcccaagggcccggcgaggggg

SEQ ID NO: 3917 - DNA, 25 bp, Homo sapiens
aagcccaagggcccggcgagggggt

SEQ ID NO: 3918 - DNA, 25 bp, Homo sapiens
agcccaagggcccggcgagggggtg

SEQ ID NO: 3919 - DNA, 25 bp, Homo sapiens
gcccaagggcccggcgagggggtgc

SEQ ID NO: 3920 - DNA, 25 bp, Homo sapiens
cccaagggcccggcgagggggtgcg

SEQ ID NO: 3921 - DNA, 25 bp, Homo sapiens
ccaagggcccggcgagggggtgcga

SEQ ID NO: 3922 - DNA, 25 bp, Homo sapiens
caagggcccggcgagggggtgcgac

SEQ ID NO: 3923 - DNA, 25 bp, Homo sapiens
aagggcccggcgagggggtgcgacc

SEQ ID NO: 3924 - DNA, 25 bp, Homo sapiens
agggcccggcgagggggtgcgacca

SEQ ID NO: 3925 - DNA, 25 bp, Homo sapiens
gggcccggcgagggggtgcgaccag

SEQ ID NO: 3926 - DNA, 25 bp, Homo sapiens
ggcccggcgagggggtgcgaccagg

SEQ ID NO: 3927 - DNA, 25 bp, Homo sapiens
gcccggcgagggggtgcgaccaggg

SEQ ID NO: 3928 - DNA, 25 bp, Homo sapiens
cccggcgagggggtgcgaccaggga

SEQ ID NO: 3929 - DNA, 25 bp, Homo sapiens
ccggcgagggggtgcgaccagggaa

SEQ ID NO: 3930 - DNA, 25 bp, Homo sapiens
cggcgagggggtgcgaccagggaaa

SEQ ID NO: 3931 - DNA, 25 bp, Homo sapiens
ggcgagggggtgcgaccagggaaag

SEQ ID NO: 3932 - DNA, 25 bp, Homo sapiens
gcgagggggtgcgaccagggaaagc

SEQ ID NO: 3933 - DNA, 25 bp, Homo sapiens
cgagggggtgcgaccagggaaagca

SEQ ID NO: 3934 - DNA, 25 bp, Homo sapiens
gagggggtgcgaccagggaaagcag

SEQ ID NO: 3935 - DNA, 25 bp, Homo sapiens
agggggtgcgaccagggaaagcaga

SEQ ID NO: 3936 - DNA, 25 bp, Homo sapiens
gggggtgcgaccagggaaagcagag

SEQ ID NO: 3937 - DNA, 25 bp, Homo sapiens
ggggtgcgaccagggaaagcagaga

SEQ ID NO: 3938 - DNA, 25 bp, Homo sapiens
gggtgcgaccagggaaagcagagaa

SEQ ID NO: 3939 - DNA, 25 bp, Homo sapiens
ggtgcgaccagggaaagcagagaag

SEQ ID NO: 3940 - DNA, 25 bp, Homo sapiens
gtgcgaccagggaaagcagagaagg

SEQ ID NO: 3941 - DNA, 25 bp, Homo sapiens
tgcgaccagggaaagcagagaagga

SEQ ID NO: 3942 - DNA, 25 bp, Homo sapiens
gcgaccagggaaagcagagaaggag

SEQ ID NO: 3943 - DNA, 25 bp, Homo sapiens
cgaccagggaaagcagagaaggagg

SEQ ID NO: 3944 - DNA, 25 bp, Homo sapiens
gaccagggaaagcagagaaggaggg

SEQ ID NO: 3945 - DNA, 25 bp, Homo sapiens
accagggaaagcagagaaggaggga

SEQ ID NO: 3946 - DNA, 25 bp, Homo sapiens
ccagggaaagcagagaaggagggag

SEQ ID NO: 3947 - DNA, 25 bp, Homo sapiens
cagggaaagcagagaaggagggagc

SEQ ID NO: 3948 - DNA, 25 bp, Homo sapiens
agggaaagcagagaaggagggagca

SEQ ID NO: 3949 - DNA, 25 bp, Homo sapiens
gggaaagcagagaaggagggagcag

SEQ ID NO: 3950 - DNA, 25 bp, Homo sapiens
ggaaagcagagaaggagggagcaga

SEQ ID NO: 3951 - DNA, 25 bp, Homo sapiens
gaaagcagagaaggagggagcagag

SEQ ID NO: 3952 - DNA, 25 bp, Homo sapiens
aaagcagagaaggagggagcagagc

SEQ ID NO: 3953 - DNA, 25 bp, Homo sapiens
aagcagagaaggagggagcagagcc

SEQ ID NO: 3954 - DNA, 25 bp, Homo sapiens
agcagagaaggagggagcagagccc

SEQ ID NO: 3955 - DNA, 25 bp, Homo sapiens
gcagagaaggagggagcagagccca

SEQ ID NO: 3956 - DNA, 25 bp, Homo sapiens
cagagaaggagggagcagagcccac

SEQ ID NO: 3957 - DNA, 25 bp, Homo sapiens
agagaaggagggagcagagcccaca

SEQ ID NO: 3958 - DNA, 25 bp, Homo sapiens
gagaaggagggagcagagcccacaa

SEQ ID NO: 3959 - DNA, 25 bp, Homo sapiens
agaaggagggagcagagcccacaaa

SEQ ID NO: 3960 - DNA, 25 bp, Homo sapiens
gaaggagggagcagagcccacaaac

SEQ ID NO: 3961 - DNA, 25 bp, Homo sapiens
aaggagggagcagagcccacaaaca

SEQ ID NO: 3962 - DNA, 25 bp, Homo sapiens
aggagggagcagagcccacaaacac

SEQ ID NO: 3963 - DNA, 25 bp, Homo sapiens
ggagggagcagagcccacaaacacg

SEQ ID NO: 3964 - DNA, 25 bp, Homo sapiens
gagggagcagagcccacaaacacgg

SEQ ID NO: 3965 - DNA, 25 bp, Homo sapiens
agggagcagagcccacaaacacggt

SEQ ID NO: 3966 - DNA, 25 bp, Homo sapiens
gggagcagagcccacaaacacggtg

SEQ ID NO: 3967 - DNA, 25 bp, Homo sapiens
ggagcagagcccacaaacacggtgg

SEQ ID NO: 3968 - DNA, 25 bp, Homo sapiens
gagcagagcccacaaacacggtgga

SEQ ID NO: 3969 - DNA, 25 bp, Homo sapiens
agcagagcccacaaacacggtggaa

SEQ ID NO: 3970 - DNA, 25 bp, Homo sapiens
gcagagcccacaaacacggtggaaa

SEQ ID NO: 3971 - DNA, 25 bp, Homo sapiens
cagagcccacaaacacggtggaaaa

SEQ ID NO: 3972 - DNA, 25 bp, Homo sapiens
agagcccacaaacacggtggaaaag

SEQ ID NO: 3973 - DNA, 25 bp, Homo sapiens
gagcccacaaacacggtggaaaagg

SEQ ID NO: 3974 - DNA, 25 bp, Homo sapiens
agcccacaaacacggtggaaaaggg

SEQ ID NO: 3975 - DNA, 25 bp, Homo sapiens
gcccacaaacacggtggaaaagggg

SEQ ID NO: 3976 - DNA, 25 bp, Homo sapiens
cccacaaacacggtggaaaagggga

SEQ ID NO: 3977 - DNA, 25 bp, Homo sapiens
ccacaaacacggtggaaaaggggaa

SEQ ID NO: 3978 - DNA, 25 bp, Homo sapiens
cacaaacacggtggaaaaggggaat

SEQ ID NO: 3979 - DNA, 25 bp, Homo sapiens
acaaacacggtggaaaaggggaatg

SEQ ID NO: 3980 - DNA, 25 bp, Homo sapiens
caaacacggtggaaaaggggaatgt

SEQ ID NO: 3981 - DNA, 25 bp, Homo sapiens
aaacacggtggaaaaggggaatgtc

SEQ ID NO: 3982 - DNA, 25 bp, Homo sapiens
aacacggtggaaaaggggaatgtct

SEQ ID NO: 3983 - DNA, 25 bp, Homo sapiens
acacggtggaaaaggggaatgtctc

SEQ ID NO: 3984 - DNA, 25 bp, Homo sapiens
cacggtggaaaaggggaatgtctct

SEQ ID NO: 3985 - DNA, 25 bp, Homo sapiens
acggtggaaaaggggaatgtctcta

SEQ ID NO: 3986 - DNA, 25 bp, Homo sapiens
cggtggaaaaggggaatgtctctaa

SEQ ID NO: 3987 - DNA, 25 bp, Homo sapiens
ggtggaaaaggggaatgtctctaag

SEQ ID NO: 3988 - DNA, 25 bp, Homo sapiens
gtggaaaaggggaatgtctctaagg

SEQ ID NO: 3989 - DNA, 25 bp, Homo sapiens
tggaaaaggggaatgtctctaagga

SEQ ID NO: 3990 - DNA, 25 bp, Homo sapiens
ggaaaaggggaatgtctctaaggac

SEQ ID NO: 3991 - DNA, 25 bp, Homo sapiens
gaaaaggggaatgtctctaaggacg

SEQ ID NO: 3992 - DNA, 25 bp, Homo sapiens
aaaaggggaatgtctctaaggacgt

SEQ ID NO: 3993 - DNA, 25 bp, Homo sapiens
aaaggggaatgtctctaaggacgta

SEQ ID NO: 3994 - DNA, 25 bp, Homo sapiens
aaggggaatgtctctaaggacgtag

SEQ ID NO: 3995 - DNA, 25 bp, Homo sapiens
aggggaatgtctctaaggacgtagg

SEQ ID NO: 3996 - DNA, 25 bp, Homo sapiens
ggggaatgtctctaaggacgtaggg

SEQ ID NO: 3997 - DNA, 25 bp, Homo sapiens
gggaatgtctctaaggacgtaggga

SEQ ID NO: 3998 - DNA, 25 bp, Homo sapiens
ggaatgtctctaaggacgtagggag

SEQ ID NO: 3999 - DNA, 25 bp, Homo sapiens
gaatgtctctaaggacgtagggagt

SEQ ID NO: 4000 - DNA, 25 bp, Homo sapiens
aatgtctctaaggacgtagggagtg

SEQ ID NO: 4001 - DNA, 25 bp, Homo sapiens
atgtctctaaggacgtagggagtga

SEQ ID NO: 4002 - DNA, 25 bp, Homo sapiens
tgtctctaaggacgtagggagtgaa

SEQ ID NO: 4003 - DNA, 25 bp, Homo sapiens
gtctctaaggacgtagggagtgaag

SEQ ID NO: 4004 - DNA, 25 bp, Homo sapiens
tctctaaggacgtagggagtgaagg

SEQ ID NO: 4005 - DNA, 25 bp, Homo sapiens
ctctaaggacgtagggagtgaaggg

SEQ ID NO: 4006 - DNA, 25 bp, Homo sapiens
tctaaggacgtagggagtgaaggga

SEQ ID NO: 4007 - DNA, 25 bp, Homo sapiens
ctaaggacgtagggagtgaagggaa

SEQ ID NO: 4008 - DNA, 25 bp, Homo sapiens
taaggacgtagggagtgaagggaag

SEQ ID NO: 4009 - DNA, 25 bp, Homo sapiens
aaggacgtagggagtgaagggaagc

SEQ ID NO: 4010 - DNA, 25 bp, Homo sapiens
aggacgtagggagtgaagggaagca

SEQ ID NO: 4011 - DNA, 25 bp, Homo sapiens
ggacgtagggagtgaagggaagcac

SEQ ID NO: 4012 - DNA, 25 bp, Homo sapiens
gacgtagggagtgaagggaagcacg

SEQ ID NO: 4013 - DNA, 25 bp, Homo sapiens
acgtagggagtgaagggaagcacgt

SEQ ID NO: 4014 - DNA, 25 bp, Homo sapiens
cgtagggagtgaagggaagcacgta

SEQ ID NO: 4015 - DNA, 25 bp, Homo sapiens
gtagggagtgaagggaagcacgtaa

SEQ ID NO: 4016 - DNA, 25 bp, Homo sapiens
tagggagtgaagggaagcacgtaag

SEQ ID NO: 4017 - DNA, 25 bp, Homo sapiens
agggagtgaagggaagcacgtaagg

SEQ ID NO: 4018 - DNA, 25 bp, Homo sapiens
gggagtgaagggaagcacgtaaggc

SEQ ID NO: 4019 - DNA, 25 bp, Homo sapiens
ggagtgaagggaagcacgtaaggcc

SEQ ID NO: 4020 - DNA, 25 bp, Homo sapiens
gagtgaagggaagcacgtaaggccc

SEQ ID NO: 4021 - DNA, 25 bp, Homo sapiens
agtgaagggaagcacgtaaggcccc

SEQ ID NO: 4022 - DNA, 25 bp, Homo sapiens
gtgaagggaagcacgtaaggcccca

SEQ ID NO: 4023 - DNA, 25 bp, Homo sapiens
tgaagggaagcacgtaaggccccaa

SEQ ID NO: 4024 - DNA, 25 bp, Homo sapiens
gaagggaagcacgtaaggccccaaa

SEQ ID NO: 4025 - DNA, 25 bp, Homo sapiens
aagggaagcacgtaaggccccaaat

SEQ ID NO: 4026 - DNA, 25 bp, Homo sapiens
agggaagcacgtaaggccccaaatc

SEQ ID NO: 4027 - DNA, 25 bp, Homo sapiens
gggaagcacgtaaggccccaaatcc

SEQ ID NO: 4028 - DNA, 25 bp, Homo sapiens
ggaagcacgtaaggccccaaatccc

SEQ ID NO: 4029 - DNA, 25 bp, Homo sapiens
gaagcacgtaaggccccaaatccct

SEQ ID NO: 4030 - DNA, 25 bp, Homo sapiens
aagcacgtaaggccccaaatccctg

SEQ ID NO: 4031 - DNA, 25 bp, Homo sapiens
agcacgtaaggccccaaatccctgg

SEQ ID NO: 4032 - DNA, 25 bp, Homo sapiens
gcacgtaaggccccaaatccctggg

SEQ ID NO: 4033 - DNA, 25 bp, Homo sapiens
cacgtaaggccccaaatccctggga

SEQ ID NO: 4034 - DNA, 25 bp, Homo sapiens
acgtaaggccccaaatccctgggag

SEQ ID NO: 4035 - DNA, 25 bp, Homo sapiens
cgtaaggccccaaatccctgggaga

SEQ ID NO: 4036 - DNA, 25 bp, Homo sapiens
gtaaggccccaaatccctgggagaa

SEQ ID NO: 4037 - DNA, 25 bp, Homo sapiens
taaggccccaaatccctgggagaaa

SEQ ID NO: 4038 - DNA, 25 bp, Homo sapiens
aaggccccaaatccctgggagaaag

SEQ ID NO: 4039 - DNA, 25 bp, Homo sapiens
aggccccaaatccctgggagaaagt

SEQ ID NO: 4040 - DNA, 25 bp, Homo sapiens
ggccccaaatccctgggagaaagtg

SEQ ID NO: 4041 - DNA, 25 bp, Homo sapiens
gccccaaatccctgggagaaagtgg

SEQ ID NO: 4042 - DNA, 25 bp, Homo sapiens
ccccaaatccctgggagaaagtggg

SEQ ID NO: 4043 - DNA, 25 bp, Homo sapiens
cccaaatccctgggagaaagtgggg

SEQ ID NO: 4044 - DNA, 25 bp, Homo sapiens
ccaaatccctgggagaaagtgggga

SEQ ID NO: 4045 - DNA, 25 bp, Homo sapiens
caaatccctgggagaaagtggggag

SEQ ID NO: 4046 - DNA, 25 bp, Homo sapiens
aaatccctgggagaaagtggggagg

SEQ ID NO: 4047 - DNA, 25 bp, Homo sapiens
aatccctgggagaaagtggggaggt

SEQ ID NO: 4048 - DNA, 25 bp, Homo sapiens
atccctgggagaaagtggggaggtt

SEQ ID NO: 4049 - DNA, 25 bp, Homo sapiens
tccctgggagaaagtggggaggttt

SEQ ID NO: 4050 - DNA, 25 bp, Homo sapiens
ccctgggagaaagtggggaggtttc

SEQ ID NO: 4051 - DNA, 25 bp, Homo sapiens
cctgggagaaagtggggaggtttcc

SEQ ID NO: 4052 - DNA, 25 bp, Homo sapiens
ctgggagaaagtggggaggtttcct

SEQ ID NO: 4053 - DNA, 25 bp, Homo sapiens
tgggagaaagtggggaggtttcctg

SEQ ID NO: 4054 - DNA, 25 bp, Homo sapiens
gggagaaagtggggaggtttcctgg

SEQ ID NO: 4055 - DNA, 25 bp, Homo sapiens
ggagaaagtggggaggtttcctggg

SEQ ID NO: 4056 - DNA, 25 bp, Homo sapiens
gagaaagtggggaggtttcctggga

SEQ ID NO: 4057 - DNA, 25 bp, Homo sapiens
agaaagtggggaggtttcctgggaa

SEQ ID NO: 4058 - DNA, 25 bp, Homo sapiens
gaaagtggggaggtttcctgggaag

SEQ ID NO: 4059 - DNA, 25 bp, Homo sapiens
aaagtggggaggtttcctgggaaga

SEQ ID NO: 4060 - DNA, 25 bp, Homo sapiens
aagtggggaggtttcctgggaagaa

SEQ ID NO: 4061 - DNA, 25 bp, Homo sapiens
agtggggaggtttcctgggaagaag

SEQ ID NO: 4062 - DNA, 25 bp, Homo sapiens
gtggggaggtttcctgggaagaagg

SEQ ID NO: 4063 - DNA, 25 bp, Homo sapiens
tggggaggtttcctgggaagaagga

SEQ ID NO: 4064 - DNA, 25 bp, Homo sapiens
ggggaggtttcctgggaagaaggag

SEQ ID NO: 4065 - DNA, 25 bp, Homo sapiens
gggaggtttcctgggaagaaggagt

SEQ ID NO: 4066 - DNA, 25 bp, Homo sapiens
ggaggtttcctgggaagaaggagta

SEQ ID NO: 4067 - DNA, 25 bp, Homo sapiens
gaggtttcctgggaagaaggagtaa

SEQ ID NO: 4068 - DNA, 25 bp, Homo sapiens
aggtttcctgggaagaaggagtaag

SEQ ID NO: 4069 - DNA, 25 bp, Homo sapiens
ggtttcctgggaagaaggagtaagt

SEQ ID NO: 4070 - DNA, 25 bp, Homo sapiens
gtttcctgggaagaaggagtaagtg

SEQ ID NO: 4071 - DNA, 25 bp, Homo sapiens
tttcctgggaagaaggagtaagtgg

SEQ ID NO: 4072 - DNA, 25 bp, Homo sapiens
ttcctgggaagaaggagtaagtggg

SEQ ID NO: 4073 - DNA, 25 bp, Homo sapiens
tcctgggaagaaggagtaagtggga

SEQ ID NO: 4074 - DNA, 25 bp, Homo sapiens
cctgggaagaaggagtaagtgggac

SEQ ID NO: 4075 - DNA, 25 bp, Homo sapiens
ctgggaagaaggagtaagtgggacg

SEQ ID NO: 4076 - DNA, 25 bp, Homo sapiens
tgggaagaaggagtaagtgggacgg

SEQ ID NO: 4077 - DNA, 25 bp, Homo sapiens
gggaagaaggagtaagtgggacggt

SEQ ID NO: 4078 - DNA, 25 bp, Homo sapiens
ggaagaaggagtaagtgggacggtc

SEQ ID NO: 4079 - DNA, 25 bp, Homo sapiens
gaagaaggagtaagtgggacggtcc

SEQ ID NO: 4080 - DNA, 25 bp, Homo sapiens
aagaaggagtaagtgggacggtccc

SEQ ID NO: 4081 - DNA, 25 bp, Homo sapiens
agaaggagtaagtgggacggtcccc

SEQ ID NO: 4082 - DNA, 25 bp, Homo sapiens
gaaggagtaagtgggacggtcccca

SEQ ID NO: 4083 - DNA, 25 bp, Homo sapiens
aaggagtaagtgggacggtccccag

SEQ ID NO: 4084 - DNA, 25 bp, Homo sapiens
aggagtaagtgggacggtccccaga

SEQ ID NO: 4085 - DNA, 25 bp, Homo sapiens
ggagtaagtgggacggtccccagaa

SEQ ID NO: 4086 - DNA, 25 bp, Homo sapiens
gagtaagtgggacggtccccagaat

SEQ ID NO: 4087 - DNA, 25 bp, Homo sapiens
agtaagtgggacggtccccagaata

SEQ ID NO: 4088 - DNA, 25 bp, Homo sapiens
gtaagtgggacggtccccagaataa

SEQ ID NO: 4089 - DNA, 25 bp, Homo sapiens
taagtgggacggtccccagaataag

SEQ ID NO: 4090 - DNA, 25 bp, Homo sapiens
aagtgggacggtccccagaataaga

SEQ ID NO: 4091 - DNA, 25 bp, Homo sapiens
agtgggacggtccccagaataagaa

SEQ ID NO: 4092 - DNA, 25 bp, Homo sapiens
gtgggacggtccccagaataagaag

SEQ ID NO: 4093 - DNA, 25 bp, Homo sapiens
tgggacggtccccagaataagaagg

SEQ ID NO: 4094 - DNA, 25 bp, Homo sapiens
gggacggtccccagaataagaagga

SEQ ID NO: 4095 - DNA, 25 bp, Homo sapiens
ggacggtccccagaataagaaggac

SEQ ID NO: 4096 - DNA, 25 bp, Homo sapiens
gacggtccccagaataagaaggaca

SEQ ID NO: 4097 - DNA, 25 bp, Homo sapiens
acggtccccagaataagaaggacaa

SEQ ID NO: 4098 - DNA, 25 bp, Homo sapiens
cggtccccagaataagaaggacaaa

SEQ ID NO: 4099 - DNA, 25 bp, Homo sapiens
ggtccccagaataagaaggacaaag

SEQ ID NO: 4100 - DNA, 25 bp, Homo sapiens
gtccccagaataagaaggacaaaga

SEQ ID NO: 4101 - DNA, 25 bp, Homo sapiens
tccccagaataagaaggacaaagaa

SEQ ID NO: 4102 - DNA, 25 bp, Homo sapiens
ccccagaataagaaggacaaagaag

SEQ ID NO: 4103 - DNA, 25 bp, Homo sapiens
cccagaataagaaggacaaagaagg

SEQ ID NO: 4104 - DNA, 25 bp, Homo sapiens
ccagaataagaaggacaaagaaggg

SEQ ID NO: 4105 - DNA, 25 bp, Homo sapiens
cagaataagaaggacaaagaagggg

SEQ ID NO: 4106 - DNA, 25 bp, Homo sapiens
agaataagaaggacaaagaaggggt

SEQ ID NO: 4107 - DNA, 25 bp, Homo sapiens
gaataagaaggacaaagaaggggtg

SEQ ID NO: 4108 - DNA, 25 bp, Homo sapiens
aataagaaggacaaagaaggggtgc

SEQ ID NO: 4109 - DNA, 25 bp, Homo sapiens
ataagaaggacaaagaaggggtgct

SEQ ID NO: 4110 - DNA, 25 bp, Homo sapiens
taagaaggacaaagaaggggtgctc

SEQ ID NO: 4111 - DNA, 25 bp, Homo sapiens
aagaaggacaaagaaggggtgctct

SEQ ID NO: 4112 - DNA, 25 bp, Homo sapiens
agaaggacaaagaaggggtgctctt

SEQ ID NO: 4113 - DNA, 25 bp, Homo sapiens
gaaggacaaagaaggggtgctctta

SEQ ID NO: 4114 - DNA, 25 bp, Homo sapiens
aaggacaaagaaggggtgctcttaa

SEQ ID NO: 4115 - DNA, 25 bp, Homo sapiens
aggacaaagaaggggtgctcttaag

SEQ ID NO: 4116 - DNA, 25 bp, Homo sapiens
ggacaaagaaggggtgctcttaagt

SEQ ID NO: 4117 - DNA, 25 bp, Homo sapiens
gacaaagaaggggtgctcttaagta

SEQ ID NO: 4118 - DNA, 25 bp, Homo sapiens
acaaagaaggggtgctcttaagtaa

SEQ ID NO: 4119 - DNA, 25 bp, Homo sapiens
caaagaaggggtgctcttaagtaag

SEQ ID NO: 4120 - DNA, 25 bp, Homo sapiens
aaagaaggggtgctcttaagtaagg

SEQ ID NO: 4121 - DNA, 25 bp, Homo sapiens
aagaaggggtgctcttaagtaaggc

SEQ ID NO: 4122 - DNA, 25 bp, Homo sapiens
agaaggggtgctcttaagtaaggca

SEQ ID NO: 4123 - DNA, 25 bp, Homo sapiens
gaaggggtgctcttaagtaaggcag

SEQ ID NO: 4124 - DNA, 25 bp, Homo sapiens
aaggggtgctcttaagtaaggcaga

SEQ ID NO: 4125 - DNA, 25 bp, Homo sapiens
aggggtgctcttaagtaaggcagag

SEQ ID NO: 4126 - DNA, 25 bp, Homo sapiens
ggggtgctcttaagtaaggcagaga

SEQ ID NO: 4127 - DNA, 25 bp, Homo sapiens
gggtgctcttaagtaaggcagagaa

SEQ ID NO: 4128 - DNA, 25 bp, Homo sapiens
ggtgctcttaagtaaggcagagaag

SEQ ID NO: 4129 - DNA, 25 bp, Homo sapiens
gtgctcttaagtaaggcagagaaga

SEQ ID NO: 4130 - DNA, 25 bp, Homo sapiens
tgctcttaagtaaggcagagaagac

SEQ ID NO: 4131 - DNA, 25 bp, Homo sapiens
gctcttaagtaaggcagagaagaca

SEQ ID NO: 4132 - DNA, 25 bp, Homo sapiens
ctcttaagtaaggcagagaagacag

SEQ ID NO: 4133 - DNA, 25 bp, Homo sapiens
tcttaagtaaggcagagaagacagg

SEQ ID NO: 4134 - DNA, 25 bp, Homo sapiens
cttaagtaaggcagagaagacaggt

SEQ ID NO: 4135 - DNA, 25 bp, Homo sapiens
ttaagtaaggcagagaagacaggtg

SEQ ID NO: 4136 - DNA, 25 bp, Homo sapiens
taagtaaggcagagaagacaggtga

SEQ ID NO: 4137 - DNA, 25 bp, Homo sapiens
aagtaaggcagagaagacaggtgag

SEQ ID NO: 4138 - DNA, 25 bp, Homo sapiens
agtaaggcagagaagacaggtgagc

SEQ ID NO: 4139 - DNA, 25 bp, Homo sapiens
gtaaggcagagaagacaggtgagcc

SEQ ID NO: 4140 - DNA, 25 bp, Homo sapiens
taaggcagagaagacaggtgagcct

SEQ ID NO: 4141 - DNA, 25 bp, Homo sapiens
aaggcagagaagacaggtgagcctc

SEQ ID NO: 4142 - DNA, 25 bp, Homo sapiens
aggcagagaagacaggtgagcctca

SEQ ID NO: 4143 - DNA, 25 bp, Homo sapiens
ggcagagaagacaggtgagcctcag

SEQ ID NO: 4144 - DNA, 25 bp, Homo sapiens
gcagagaagacaggtgagcctcaga

SEQ ID NO: 4145 - DNA, 25 bp, Homo sapiens
cagagaagacaggtgagcctcagac

SEQ ID NO: 4146 - DNA, 25 bp, Homo sapiens
agagaagacaggtgagcctcagacc

SEQ ID NO: 4147 - DNA, 25 bp, Homo sapiens
gagaagacaggtgagcctcagaccc

SEQ ID NO: 4148 - DNA, 25 bp, Homo sapiens
agaagacaggtgagcctcagaccca

SEQ ID NO: 4149 - DNA, 25 bp, Homo sapiens
gaagacaggtgagcctcagacccag

SEQ ID NO: 4150 - DNA, 25 bp, Homo sapiens
aagacaggtgagcctcagacccaga

SEQ ID NO: 4151 - DNA, 25 bp, Homo sapiens
agacaggtgagcctcagacccagat

SEQ ID NO: 4152 - DNA, 25 bp, Homo sapiens
gacaggtgagcctcagacccagatg

SEQ ID NO: 4153 - DNA, 25 bp, Homo sapiens
acaggtgagcctcagacccagatgg

SEQ ID NO: 4154 - DNA, 25 bp, Homo sapiens
caggtgagcctcagacccagatgga

SEQ ID NO: 4155 - DNA, 25 bp, Homo sapiens
aggtgagcctcagacccagatggag

SEQ ID NO: 4156 - DNA, 25 bp, Homo sapiens
ggtgagcctcagacccagatggaga

SEQ ID NO: 4157 - DNA, 25 bp, Homo sapiens
gtgagcctcagacccagatggagaa

SEQ ID NO: 4158 - DNA, 25 bp, Homo sapiens
tgagcctcagacccagatggagaag

SEQ ID NO: 4159 - DNA, 25 bp, Homo sapiens
gagcctcagacccagatggagaaga

SEQ ID NO: 4160 - DNA, 25 bp, Homo sapiens
agcctcagacccagatggagaagac

SEQ ID NO: 4161 - DNA, 25 bp, Homo sapiens
gcctcagacccagatggagaagaca

SEQ ID NO: 4162 - DNA, 25 bp, Homo sapiens
cctcagacccagatggagaagacaa

SEQ ID NO: 4163 - DNA, 25 bp, Homo sapiens
ctcagacccagatggagaagacaag

SEQ ID NO: 4164 - DNA, 25 bp, Homo sapiens
tcagacccagatggagaagacaagc

SEQ ID NO: 4165 - DNA, 25 bp, Homo sapiens
cagacccagatggagaagacaagcc

SEQ ID NO: 4166 - DNA, 25 bp, Homo sapiens
agacccagatggagaagacaagcca

SEQ ID NO: 4167 - DNA, 25 bp, Homo sapiens
gacccagatggagaagacaagccaa

SEQ ID NO: 4168 - DNA, 25 bp, Homo sapiens
acccagatggagaagacaagccaag

SEQ ID NO: 4169 - DNA, 25 bp, Homo sapiens
cccagatggagaagacaagccaagt

SEQ ID NO: 4170 - DNA, 25 bp, Homo sapiens
ccagatggagaagacaagccaagtg

SEQ ID NO: 4171 - DNA, 25 bp, Homo sapiens
cagatggagaagacaagccaagtgc

SEQ ID NO: 4172 - DNA, 25 bp, Homo sapiens
agatggagaagacaagccaagtgca

SEQ ID NO: 4173 - DNA, 25 bp, Homo sapiens
gatggagaagacaagccaagtgcag

SEQ ID NO: 4174 - DNA, 25 bp, Homo sapiens
atggagaagacaagccaagtgcagg

SEQ ID NO: 4175 - DNA, 25 bp, Homo sapiens
tggagaagacaagccaagtgcaggg

SEQ ID NO: 4176 - DNA, 25 bp, Homo sapiens
ggagaagacaagccaagtgcagggc

SEQ ID NO: 4177 - DNA, 25 bp, Homo sapiens
gagaagacaagccaagtgcagggcg

SEQ ID NO: 4178 - DNA, 25 bp, Homo sapiens
agaagacaagccaagtgcagggcga

SEQ ID NO: 4179 - DNA, 25 bp, Homo sapiens
gaagacaagccaagtgcagggcgag

SEQ ID NO: 4180 - DNA, 25 bp, Homo sapiens
aagacaagccaagtgcagggcgagt

SEQ ID NO: 4181 - DNA, 25 bp, Homo sapiens
agacaagccaagtgcagggcgagtt

SEQ ID NO: 4182 - DNA, 25 bp, Homo sapiens
gacaagccaagtgcagggcgagttg

SEQ ID NO: 4183 - DNA, 25 bp, Homo sapiens
acaagccaagtgcagggcgagttgg

SEQ ID NO: 4184 - DNA, 25 bp, Homo sapiens
caagccaagtgcagggcgagttggg

SEQ ID NO: 4185 - DNA, 25 bp, Homo sapiens
aagccaagtgcagggcgagttgggg

SEQ ID NO: 4186 - DNA, 25 bp, Homo sapiens
agccaagtgcagggcgagttggggg

SEQ ID NO: 4187 - DNA, 25 bp, Homo sapiens
gccaagtgcagggcgagttggggga

SEQ ID NO: 4188 - DNA, 25 bp, Homo sapiens
ccaagtgcagggcgagttgggggac

SEQ ID NO: 4189 - DNA, 25 bp, Homo sapiens
caagtgcagggcgagttgggggacg

SEQ ID NO: 4190 - DNA, 25 bp, Homo sapiens
aagtgcagggcgagttgggggacga

SEQ ID NO: 4191 - DNA, 25 bp, Homo sapiens
agtgcagggcgagttgggggacgat

SEQ ID NO: 4192 - DNA, 25 bp, Homo sapiens
gtgcagggcgagttgggggacgatc

SEQ ID NO: 4193 - DNA, 25 bp, Homo sapiens
tgcagggcgagttgggggacgatct

SEQ ID NO: 4194 - DNA, 25 bp, Homo sapiens
gcagggcgagttgggggacgatctg

SEQ ID NO: 4195 - DNA, 25 bp, Homo sapiens
cagggcgagttgggggacgatctga

SEQ ID NO: 4196 - DNA, 25 bp, Homo sapiens
agggcgagttgggggacgatctgag

SEQ ID NO: 4197 - DNA, 25 bp, Homo sapiens
gggcgagttgggggacgatctgaga

SEQ ID NO: 4198 - DNA, 25 bp, Homo sapiens
ggcgagttgggggacgatctgagaa

SEQ ID NO: 4199 - DNA, 25 bp, Homo sapiens
gcgagttgggggacgatctgagaat

SEQ ID NO: 4200 - DNA, 25 bp, Homo sapiens
cgagttgggggacgatctgagaatg

SEQ ID NO: 4201 - DNA, 25 bp, Homo sapiens
gagttgggggacgatctgagaatgg

SEQ ID NO: 4202 - DNA, 25 bp, Homo sapiens
agttgggggacgatctgagaatggg

SEQ ID NO: 4203 - DNA, 25 bp, Homo sapiens
gttgggggacgatctgagaatgggg

SEQ ID NO: 4204 - DNA, 25 bp, Homo sapiens
ttgggggacgatctgagaatggggg

SEQ ID NO: 4205 - DNA, 25 bp, Homo sapiens
tgggggacgatctgagaatggggga

SEQ ID NO: 4206 - DNA, 25 bp, Homo sapiens
gggggacgatctgagaatgggggag

SEQ ID NO: 4207 - DNA, 25 bp, Homo sapiens
ggggacgatctgagaatgggggaga

SEQ ID NO: 4208 - DNA, 25 bp, Homo sapiens
gggacgatctgagaatgggggagaa

SEQ ID NO: 4209 - DNA, 25 bp, Homo sapiens
ggacgatctgagaatgggggagaaa

SEQ ID NO: 4210 - DNA, 25 bp, Homo sapiens
gacgatctgagaatgggggagaaag

SEQ ID NO: 4211 - DNA, 25 bp, Homo sapiens
acgatctgagaatgggggagaaagc

SEQ ID NO: 4212 - DNA, 25 bp, Homo sapiens
cgatctgagaatgggggagaaagca

SEQ ID NO: 4213 - DNA, 25 bp, Homo sapiens
gatctgagaatgggggagaaagcag

SEQ ID NO: 4214 - DNA, 25 bp, Homo sapiens
atctgagaatgggggagaaagcagg

SEQ ID NO: 4215 - DNA, 25 bp, Homo sapiens
tctgagaatgggggagaaagcaggt

SEQ ID NO: 4216 - DNA, 25 bp, Homo sapiens
ctgagaatgggggagaaagcaggtg

SEQ ID NO: 4217 - DNA, 25 bp, Homo sapiens
tgagaatgggggagaaagcaggtga

SEQ ID NO: 4218 - DNA, 25 bp, Homo sapiens
gagaatgggggagaaagcaggtgag

SEQ ID NO: 4219 - DNA, 25 bp, Homo sapiens
agaatgggggagaaagcaggtgagc

SEQ ID NO: 4220 - DNA, 25 bp, Homo sapiens
gaatgggggagaaagcaggtgagct

SEQ ID NO: 4221 - DNA, 25 bp, Homo sapiens
aatgggggagaaagcaggtgagctt

SEQ ID NO: 4222 - DNA, 25 bp, Homo sapiens
atgggggagaaagcaggtgagcttc

SEQ ID NO: 4223 - DNA, 25 bp, Homo sapiens
tgggggagaaagcaggtgagcttcg

SEQ ID NO: 4224 - DNA, 25 bp, Homo sapiens
gggggagaaagcaggtgagcttcgg

SEQ ID NO: 4225 - DNA, 25 bp, Homo sapiens
ggggagaaagcaggtgagcttcgga

SEQ ID NO: 4226 - DNA, 25 bp, Homo sapiens
gggagaaagcaggtgagcttcggag

SEQ ID NO: 4227 - DNA, 25 bp, Homo sapiens
ggagaaagcaggtgagcttcggagc

SEQ ID NO: 4228 - DNA, 25 bp, Homo sapiens
gagaaagcaggtgagcttcggagca

SEQ ID NO: 4229 - DNA, 25 bp, Homo sapiens
agaaagcaggtgagcttcggagcac

SEQ ID NO: 4230 - DNA, 25 bp, Homo sapiens
gaaagcaggtgagcttcggagcacg

SEQ ID NO: 4231 - DNA, 25 bp, Homo sapiens
aaagcaggtgagcttcggagcacga

SEQ ID NO: 4232 - DNA, 25 bp, Homo sapiens
aagcaggtgagcttcggagcacgac

SEQ ID NO: 4233 - DNA, 25 bp, Homo sapiens
agcaggtgagcttcggagcacgact

SEQ ID NO: 4234 - DNA, 25 bp, Homo sapiens
gcaggtgagcttcggagcacgactg

SEQ ID NO: 4235 - DNA, 25 bp, Homo sapiens
caggtgagcttcggagcacgactgg

SEQ ID NO: 4236 - DNA, 25 bp, Homo sapiens
aggtgagcttcggagcacgactggg

SEQ ID NO: 4237 - DNA, 25 bp, Homo sapiens
ggtgagcttcggagcacgactggga

SEQ ID NO: 4238 - DNA, 25 bp, Homo sapiens
gtgagcttcggagcacgactgggaa

SEQ ID NO: 4239 - DNA, 25 bp, Homo sapiens
tgagcttcggagcacgactgggaag

SEQ ID NO: 4240 - DNA, 25 bp, Homo sapiens
gagcttcggagcacgactgggaagg

SEQ ID NO: 4241 - DNA, 25 bp, Homo sapiens
agcttcggagcacgactgggaaggc

SEQ ID NO: 4242 - DNA, 25 bp, Homo sapiens
gcttcggagcacgactgggaaggca

SEQ ID NO: 4243 - DNA, 25 bp, Homo sapiens
cttcggagcacgactgggaaggcag

SEQ ID NO: 4244 - DNA, 25 bp, Homo sapiens
ttcggagcacgactgggaaggcagg

SEQ ID NO: 4245 - DNA, 25 bp, Homo sapiens
tcggagcacgactgggaaggcaggt

SEQ ID NO: 4246 - DNA, 25 bp, Homo sapiens
cggagcacgactgggaaggcaggtg

SEQ ID NO: 4247 - DNA, 25 bp, Homo sapiens
ggagcacgactgggaaggcaggtga

SEQ ID NO: 4248 - DNA, 25 bp, Homo sapiens
gagcacgactgggaaggcaggtgag

SEQ ID NO: 4249 - DNA, 25 bp, Homo sapiens
agcacgactgggaaggcaggtgagt

SEQ ID NO: 4250 - DNA, 25 bp, Homo sapiens
gcacgactgggaaggcaggtgagtc

SEQ ID NO: 4251 - DNA, 25 bp, Homo sapiens
cacgactgggaaggcaggtgagtcc

SEQ ID NO: 4252 - DNA, 25 bp, Homo sapiens
acgactgggaaggcaggtgagtcct

SEQ ID NO: 4253 - DNA, 25 bp, Homo sapiens
cgactgggaaggcaggtgagtcctg

SEQ ID NO: 4254 - DNA, 25 bp, Homo sapiens
gactgggaaggcaggtgagtcctgg

SEQ ID NO: 4255 - DNA, 25 bp, Homo sapiens
actgggaaggcaggtgagtcctggg

SEQ ID NO: 4256 - DNA, 25 bp, Homo sapiens
ctgggaaggcaggtgagtcctggga

SEQ ID NO: 4257 - DNA, 25 bp, Homo sapiens
tgggaaggcaggtgagtcctgggat

SEQ ID NO: 4258 - DNA, 25 bp, Homo sapiens
gggaaggcaggtgagtcctgggata

SEQ ID NO: 4259 - DNA, 25 bp, Homo sapiens
ggaaggcaggtgagtcctgggataa

SEQ ID NO: 4260 - DNA, 25 bp, Homo sapiens
gaaggcaggtgagtcctgggataag

SEQ ID NO: 4261 - DNA, 25 bp, Homo sapiens
aaggcaggtgagtcctgggataaga

SEQ ID NO: 4262 - DNA, 25 bp, Homo sapiens
aggcaggtgagtcctgggataagaa

SEQ ID NO: 4263 - DNA, 25 bp, Homo sapiens
ggcaggtgagtcctgggataagaag

SEQ ID NO: 4264 - DNA, 25 bp, Homo sapiens
gcaggtgagtcctgggataagaagg

SEQ ID NO: 4265 - DNA, 25 bp, Homo sapiens
caggtgagtcctgggataagaagga

SEQ ID NO: 4266 - DNA, 25 bp, Homo sapiens
aggtgagtcctgggataagaaggaa

SEQ ID NO: 4267 - DNA, 25 bp, Homo sapiens
ggtgagtcctgggataagaaggaaa

SEQ ID NO: 4268 - DNA, 25 bp, Homo sapiens
gtgagtcctgggataagaaggaaaa

SEQ ID NO: 4269 - DNA, 25 bp, Homo sapiens
tgagtcctgggataagaaggaaaag

SEQ ID NO: 4270 - DNA, 25 bp, Homo sapiens
gagtcctgggataagaaggaaaaga

SEQ ID NO: 4271 - DNA, 25 bp, Homo sapiens
agtcctgggataagaaggaaaagat

SEQ ID NO: 4272 - DNA, 25 bp, Homo sapiens
gtcctgggataagaaggaaaagatg

SEQ ID NO: 4273 - DNA, 25 bp, Homo sapiens
tcctgggataagaaggaaaagatgg

SEQ ID NO: 4274 - DNA, 25 bp, Homo sapiens
cctgggataagaaggaaaagatggg

SEQ ID NO: 4275 - DNA, 25 bp, Homo sapiens
ctgggataagaaggaaaagatgggg

SEQ ID NO: 4276 - DNA, 25 bp, Homo sapiens
tgggataagaaggaaaagatggggc

SEQ ID NO: 4277 - DNA, 25 bp, Homo sapiens
gggataagaaggaaaagatggggca

SEQ ID NO: 4278 - DNA, 25 bp, Homo sapiens
ggataagaaggaaaagatggggcaa

SEQ ID NO: 4279 - DNA, 25 bp, Homo sapiens
gataagaaggaaaagatggggcaac

SEQ ID NO: 4280 - DNA, 25 bp, Homo sapiens
ataagaaggaaaagatggggcaacc

SEQ ID NO: 4281 - DNA, 25 bp, Homo sapiens
taagaaggaaaagatggggcaaccc

SEQ ID NO: 4282 - DNA, 25 bp, Homo sapiens
aagaaggaaaagatggggcaacccc

SEQ ID NO: 4283 - DNA, 25 bp, Homo sapiens
agaaggaaaagatggggcaacccca

SEQ ID NO: 4284 - DNA, 25 bp, Homo sapiens
gaaggaaaagatggggcaaccccag

SEQ ID NO: 4285 - DNA, 25 bp, Homo sapiens
aaggaaaagatggggcaaccccagg

SEQ ID NO: 4286 - DNA, 25 bp, Homo sapiens
aggaaaagatggggcaaccccaggg

SEQ ID NO: 4287 - DNA, 25 bp, Homo sapiens
ggaaaagatggggcaaccccagggt

SEQ ID NO: 4288 - DNA, 25 bp, Homo sapiens
gaaaagatggggcaaccccagggta

SEQ ID NO: 4289 - DNA, 25 bp, Homo sapiens
aaaagatggggcaaccccagggtaa

SEQ ID NO: 4290 - DNA, 25 bp, Homo sapiens
aaagatggggcaaccccagggtaag

SEQ ID NO: 4291 - DNA, 25 bp, Homo sapiens
aagatggggcaaccccagggtaagt

SEQ ID NO: 4292 - DNA, 25 bp, Homo sapiens
agatggggcaaccccagggtaagtc

SEQ ID NO: 4293 - DNA, 25 bp, Homo sapiens
gatggggcaaccccagggtaagtcc

SEQ ID NO: 4294 - DNA, 25 bp, Homo sapiens
atggggcaaccccagggtaagtccg

SEQ ID NO: 4295 - DNA, 25 bp, Homo sapiens
tggggcaaccccagggtaagtccgg

SEQ ID NO: 4296 - DNA, 25 bp, Homo sapiens
ggggcaaccccagggtaagtccggg

SEQ ID NO: 4297 - DNA, 25 bp, Homo sapiens
gggcaaccccagggtaagtccggga

SEQ ID NO: 4298 - DNA, 25 bp, Homo sapiens
ggcaaccccagggtaagtccgggaa

SEQ ID NO: 4299 - DNA, 25 bp, Homo sapiens
gcaaccccagggtaagtccgggaac

SEQ ID NO: 4300 - DNA, 25 bp, Homo sapiens
caaccccagggtaagtccgggaacg

SEQ ID NO: 4301 - DNA, 25 bp, Homo sapiens
aaccccagggtaagtccgggaacgc

SEQ ID NO: 4302 - DNA, 25 bp, Homo sapiens
accccagggtaagtccgggaacgca

SEQ ID NO: 4303 - DNA, 25 bp, Homo sapiens
ccccagggtaagtccgggaacgcag

SEQ ID NO: 4304 - DNA, 25 bp, Homo sapiens
cccagggtaagtccgggaacgcagg

SEQ ID NO: 4305 - DNA, 25 bp, Homo sapiens
ccagggtaagtccgggaacgcaggt

SEQ ID NO: 4306 - DNA, 25 bp, Homo sapiens
cagggtaagtccgggaacgcaggtg

SEQ ID NO: 4307 - DNA, 25 bp, Homo sapiens
agggtaagtccgggaacgcaggtga

SEQ ID NO: 4308 - DNA, 25 bp, Homo sapiens
gggtaagtccgggaacgcaggtgaa

SEQ ID NO: 4309 - DNA, 25 bp, Homo sapiens
ggtaagtccgggaacgcaggtgaag

SEQ ID NO: 4310 - DNA, 25 bp, Homo sapiens
gtaagtccgggaacgcaggtgaagc

SEQ ID NO: 4311 - DNA, 25 bp, Homo sapiens
taagtccgggaacgcaggtgaagct

SEQ ID NO: 4312 - DNA, 25 bp, Homo sapiens
aagtccgggaacgcaggtgaagctc

SEQ ID NO: 4313 - DNA, 25 bp, Homo sapiens
agtccgggaacgcaggtgaagctcg

SEQ ID NO: 4314 - DNA, 25 bp, Homo sapiens
gtccgggaacgcaggtgaagctcgg

SEQ ID NO: 4315 - DNA, 25 bp, Homo sapiens
tccgggaacgcaggtgaagctcgga

SEQ ID NO: 4316 - DNA, 25 bp, Homo sapiens
ccgggaacgcaggtgaagctcggag

SEQ ID NO: 4317 - DNA, 25 bp, Homo sapiens
cgggaacgcaggtgaagctcggagt

SEQ ID NO: 4318 - DNA, 25 bp, Homo sapiens
gggaacgcaggtgaagctcggagtc

SEQ ID NO: 4319 - DNA, 25 bp, Homo sapiens
ggaacgcaggtgaagctcggagtca

SEQ ID NO: 4320 - DNA, 25 bp, Homo sapiens
gaacgcaggtgaagctcggagtcag

SEQ ID NO: 4321 - DNA, 25 bp, Homo sapiens
aacgcaggtgaagctcggagtcaga

SEQ ID NO: 4322 - DNA, 25 bp, Homo sapiens
acgcaggtgaagctcggagtcagac

SEQ ID NO: 4323 - DNA, 25 bp, Homo sapiens
cgcaggtgaagctcggagtcagaca

SEQ ID NO: 4324 - DNA, 25 bp, Homo sapiens
gcaggtgaagctcggagtcagacag

SEQ ID NO: 4325 - DNA, 25 bp, Homo sapiens
caggtgaagctcggagtcagacaga

SEQ ID NO: 4326 - DNA, 25 bp, Homo sapiens
aggtgaagctcggagtcagacagag

SEQ ID NO: 4327 - DNA, 25 bp, Homo sapiens
ggtgaagctcggagtcagacagaga

SEQ ID NO: 4328 - DNA, 25 bp, Homo sapiens
gtgaagctcggagtcagacagagaa

SEQ ID NO: 4329 - DNA, 25 bp, Homo sapiens
tgaagctcggagtcagacagagaag

SEQ ID NO: 4330 - DNA, 25 bp, Homo sapiens
gaagctcggagtcagacagagaagg

SEQ ID NO: 4331 - DNA, 25 bp, Homo sapiens
aagctcggagtcagacagagaaggg

SEQ ID NO: 4332 - DNA, 25 bp, Homo sapiens
agctcggagtcagacagagaagggc

SEQ ID NO: 4333 - DNA, 25 bp, Homo sapiens
gctcggagtcagacagagaagggct

SEQ ID NO: 4334 - DNA, 25 bp, Homo sapiens
ctcggagtcagacagagaagggctg

SEQ ID NO: 4335 - DNA, 25 bp, Homo sapiens
tcggagtcagacagagaagggctgt

SEQ ID NO: 4336 - DNA, 25 bp, Homo sapiens
cggagtcagacagagaagggctgtg

SEQ ID NO: 4337 - DNA, 25 bp, Homo sapiens
ggagtcagacagagaagggctgtga

SEQ ID NO: 4338 - DNA, 25 bp, Homo sapiens
gagtcagacagagaagggctgtgaa

SEQ ID NO: 4339 - DNA, 25 bp, Homo sapiens
agtcagacagagaagggctgtgaag

SEQ ID NO: 4340 - DNA, 25 bp, Homo sapiens
gtcagacagagaagggctgtgaagc

SEQ ID NO: 4341 - DNA, 25 bp, Homo sapiens
tcagacagagaagggctgtgaagcc

SEQ ID NO: 4342 - DNA, 25 bp, Homo sapiens
cagacagagaagggctgtgaagccc

SEQ ID NO: 4343 - DNA, 25 bp, Homo sapiens
agacagagaagggctgtgaagcccc

SEQ ID NO: 4344 - DNA, 25 bp, Homo sapiens
gacagagaagggctgtgaagcccca

SEQ ID NO: 4345 - DNA, 25 bp, Homo sapiens
acagagaagggctgtgaagccccaa

SEQ ID NO: 4346 - DNA, 25 bp, Homo sapiens
cagagaagggctgtgaagccccaaa

SEQ ID NO: 4347 - DNA, 25 bp, Homo sapiens
agagaagggctgtgaagccccaaag

SEQ ID NO: 4348 - DNA, 25 bp, Homo sapiens
gagaagggctgtgaagccccaaagg

SEQ ID NO: 4349 - DNA, 25 bp, Homo sapiens
agaagggctgtgaagccccaaagga

SEQ ID NO: 4350 - DNA, 25 bp, Homo sapiens
gaagggctgtgaagccccaaaggag

SEQ ID NO: 4351 - DNA, 25 bp, Homo sapiens
aagggctgtgaagccccaaaggagg

SEQ ID NO: 4352 - DNA, 25 bp, Homo sapiens
agggctgtgaagccccaaaggaggt

SEQ ID NO: 4353 - DNA, 25 bp, Homo sapiens
gggctgtgaagccccaaaggaggtg

SEQ ID NO: 4354 - DNA, 25 bp, Homo sapiens
ggctgtgaagccccaaaggaggtga

SEQ ID NO: 4355 - DNA, 25 bp, Homo sapiens
gctgtgaagccccaaaggaggtgag

SEQ ID NO: 4356 - DNA, 25 bp, Homo sapiens
ctgtgaagccccaaaggaggtgagc

SEQ ID NO: 4357 - DNA, 25 bp, Homo sapiens
tgtgaagccccaaaggaggtgagca

SEQ ID NO: 4358 - DNA, 25 bp, Homo sapiens
gtgaagccccaaaggaggtgagcac

SEQ ID NO: 4359 - DNA, 25 bp, Homo sapiens
tgaagccccaaaggaggtgagcaca

SEQ ID NO: 4360 - DNA, 25 bp, Homo sapiens
gaagccccaaaggaggtgagcacaa

SEQ ID NO: 4361 - DNA, 25 bp, Homo sapiens
aagccccaaaggaggtgagcacaat

SEQ ID NO: 4362 - DNA, 25 bp, Homo sapiens
agccccaaaggaggtgagcacaatg

SEQ ID NO: 4363 - DNA, 25 bp, Homo sapiens
gccccaaaggaggtgagcacaatgg

SEQ ID NO: 4364 - DNA, 25 bp, Homo sapiens
ccccaaaggaggtgagcacaatggt

SEQ ID NO: 4365 - DNA, 25 bp, Homo sapiens
cccaaaggaggtgagcacaatggtg

SEQ ID NO: 4366 - DNA, 25 bp, Homo sapiens
ccaaaggaggtgagcacaatggtgg

SEQ ID NO: 4367 - DNA, 25 bp, Homo sapiens
caaaggaggtgagcacaatggtgga

SEQ ID NO: 4368 - DNA, 25 bp, Homo sapiens
aaaggaggtgagcacaatggtggag

SEQ ID NO: 4369 - DNA, 25 bp, Homo sapiens
aaggaggtgagcacaatggtggagt

SEQ ID NO: 4370 - DNA, 25 bp, Homo sapiens
aggaggtgagcacaatggtggagtc

SEQ ID NO: 4371 - DNA, 25 bp, Homo sapiens
ggaggtgagcacaatggtggagtcg

SEQ ID NO: 4372 - DNA, 25 bp, Homo sapiens
gaggtgagcacaatggtggagtcgc

SEQ ID NO: 4373 - DNA, 25 bp, Homo sapiens
aggtgagcacaatggtggagtcgcc

SEQ ID NO: 4374 - DNA, 25 bp, Homo sapiens
ggtgagcacaatggtggagtcgcca

SEQ ID NO: 4375 - DNA, 25 bp, Homo sapiens
gtgagcacaatggtggagtcgccag

SEQ ID NO: 4376 - DNA, 25 bp, Homo sapiens
tgagcacaatggtggagtcgccagc

SEQ ID NO: 4377 - DNA, 25 bp, Homo sapiens
gagcacaatggtggagtcgccagca

SEQ ID NO: 4378 - DNA, 25 bp, Homo sapiens
agcacaatggtggagtcgccagcag

SEQ ID NO: 4379 - DNA, 25 bp, Homo sapiens
gcacaatggtggagtcgccagcagc

SEQ ID NO: 4380 - DNA, 25 bp, Homo sapiens
cacaatggtggagtcgccagcagct

SEQ ID NO: 4381 - DNA, 25 bp, Homo sapiens
acaatggtggagtcgccagcagctc

SEQ ID NO: 4382 - DNA, 25 bp, Homo sapiens
caatggtggagtcgccagcagctcc

SEQ ID NO: 4383 - DNA, 25 bp, Homo sapiens
aatggtggagtcgccagcagctcct

SEQ ID NO: 4384 - DNA, 25 bp, Homo sapiens
atggtggagtcgccagcagctcctg

SEQ ID NO: 4385 - DNA, 25 bp, Homo sapiens
tggtggagtcgccagcagctcctgg

SEQ ID NO: 4386 - DNA, 25 bp, Homo sapiens
ggtggagtcgccagcagctcctggg

SEQ ID NO: 4387 - DNA, 25 bp, Homo sapiens
gtggagtcgccagcagctcctggga

SEQ ID NO: 4388 - DNA, 25 bp, Homo sapiens
tggagtcgccagcagctcctgggaa

SEQ ID NO: 4389 - DNA, 25 bp, Homo sapiens
ggagtcgccagcagctcctgggaag

SEQ ID NO: 4390 - DNA, 25 bp, Homo sapiens
gagtcgccagcagctcctgggaagg

SEQ ID NO: 4391 - DNA, 25 bp, Homo sapiens
agtcgccagcagctcctgggaaggg

SEQ ID NO: 4392 - DNA, 25 bp, Homo sapiens
gtcgccagcagctcctgggaaggga

SEQ ID NO: 4393 - DNA, 25 bp, Homo sapiens
tcgccagcagctcctgggaagggag

SEQ ID NO: 4394 - DNA, 25 bp, Homo sapiens
cgccagcagctcctgggaagggagg

SEQ ID NO: 4395 - DNA, 25 bp, Homo sapiens
gccagcagctcctgggaagggaggc

SEQ ID NO: 4396 - DNA, 25 bp, Homo sapiens
ccagcagctcctgggaagggaggct

SEQ ID NO: 4397 - DNA, 25 bp, Homo sapiens
cagcagctcctgggaagggaggctg

SEQ ID NO: 4398 - DNA, 25 bp, Homo sapiens
agcagctcctgggaagggaggctgg

SEQ ID NO: 4399 - DNA, 25 bp, Homo sapiens
gcagctcctgggaagggaggctggc

SEQ ID NO: 4400 - DNA, 25 bp, Homo sapiens
cagctcctgggaagggaggctggcc

SEQ ID NO: 4401 - DNA, 25 bp, Homo sapiens
agctcctgggaagggaggctggcca

SEQ ID NO: 4402 - DNA, 25 bp, Homo sapiens
gctcctgggaagggaggctggccag

SEQ ID NO: 4403 - DNA, 25 bp, Homo sapiens
ctcctgggaagggaggctggccagg

SEQ ID NO: 4404 - DNA, 25 bp, Homo sapiens
tcctgggaagggaggctggccagga

SEQ ID NO: 4405 - DNA, 25 bp, Homo sapiens
cctgggaagggaggctggccaggaa

SEQ ID NO: 4406 - DNA, 25 bp, Homo sapiens
ctgggaagggaggctggccaggaag

SEQ ID NO: 4407 - DNA, 25 bp, Homo sapiens
tgggaagggaggctggccaggaagc

SEQ ID NO: 4408 - DNA, 25 bp, Homo sapiens
gggaagggaggctggccaggaagcc

SEQ ID NO: 4409 - DNA, 25 bp, Homo sapiens
ggaagggaggctggccaggaagccg

SEQ ID NO: 4410 - DNA, 25 bp, Homo sapiens
gaagggaggctggccaggaagccgt

SEQ ID NO: 4411 - DNA, 25 bp, Homo sapiens
aagggaggctggccaggaagccgtg

SEQ ID NO: 4412 - DNA, 25 bp, Homo sapiens
agggaggctggccaggaagccgtgg

SEQ ID NO: 4413 - DNA, 25 bp, Homo sapiens
gggaggctggccaggaagccgtggg

SEQ ID NO: 4414 - DNA, 25 bp, Homo sapiens
ggaggctggccaggaagccgtgggc

SEQ ID NO: 4415 - DNA, 25 bp, Homo sapiens
gaggctggccaggaagccgtgggca

SEQ ID NO: 4416 - DNA, 25 bp, Homo sapiens
aggctggccaggaagccgtgggcag

SEQ ID NO: 4417 - DNA, 25 bp, Homo sapiens
ggctggccaggaagccgtgggcagg

SEQ ID NO: 4418 - DNA, 25 bp, Homo sapiens
gctggccaggaagccgtgggcagga

SEQ ID NO: 4419 - DNA, 25 bp, Homo sapiens
ctggccaggaagccgtgggcaggaa

SEQ ID NO: 4420 - DNA, 25 bp, Homo sapiens
tggccaggaagccgtgggcaggaag

SEQ ID NO: 4421 - DNA, 25 bp, Homo sapiens
ggccaggaagccgtgggcaggaagc

SEQ ID NO: 4422 - DNA, 25 bp, Homo sapiens
gccaggaagccgtgggcaggaagca

SEQ ID NO: 4423 - DNA, 25 bp, Homo sapiens
ccaggaagccgtgggcaggaagcag

SEQ ID NO: 4424 - DNA, 25 bp, Homo sapiens
caggaagccgtgggcaggaagcaga

SEQ ID NO: 4425 - DNA, 25 bp, Homo sapiens
aggaagccgtgggcaggaagcagag

SEQ ID NO: 4426 - DNA, 25 bp, Homo sapiens
ggaagccgtgggcaggaagcagagg

SEQ ID NO: 4427 - DNA, 25 bp, Homo sapiens
gaagccgtgggcaggaagcagagga

SEQ ID NO: 4428 - DNA, 25 bp, Homo sapiens
aagccgtgggcaggaagcagaggag

SEQ ID NO: 4429 - DNA, 25 bp, Homo sapiens
agccgtgggcaggaagcagaggagc

SEQ ID NO: 4430 - DNA, 25 bp, Homo sapiens
gccgtgggcaggaagcagaggagcc

SEQ ID NO: 4431 - DNA, 25 bp, Homo sapiens
ccgtgggcaggaagcagaggagccc

SEQ ID NO: 4432 - DNA, 25 bp, Homo sapiens
cgtgggcaggaagcagaggagccct

SEQ ID NO: 4433 - DNA, 25 bp, Homo sapiens
gtgggcaggaagcagaggagccctg

SEQ ID NO: 4434 - DNA, 25 bp, Homo sapiens
tgggcaggaagcagaggagccctgc

SEQ ID NO: 4435 - DNA, 25 bp, Homo sapiens
gggcaggaagcagaggagccctgct

SEQ ID NO: 4436 - DNA, 25 bp, Homo sapiens
ggcaggaagcagaggagccctgctc

SEQ ID NO: 4437 - DNA, 25 bp, Homo sapiens
gcaggaagcagaggagccctgctca

SEQ ID NO: 4438 - DNA, 25 bp, Homo sapiens
caggaagcagaggagccctgctcaa

SEQ ID NO: 4439 - DNA, 25 bp, Homo sapiens
aggaagcagaggagccctgctcaag

SEQ ID NO: 4440 - DNA, 25 bp, Homo sapiens
ggaagcagaggagccctgctcaaga

SEQ ID NO: 4441 - DNA, 25 bp, Homo sapiens
gaagcagaggagccctgctcaagag

SEQ ID NO: 4442 - DNA, 25 bp, Homo sapiens
aagcagaggagccctgctcaagagc

SEQ ID NO: 4443 - DNA, 25 bp, Homo sapiens
agcagaggagccctgctcaagagca

SEQ ID NO: 4444 - DNA, 25 bp, Homo sapiens
gcagaggagccctgctcaagagcag

SEQ ID NO: 4445 - DNA, 25 bp, Homo sapiens
cagaggagccctgctcaagagcagg

SEQ ID NO: 4446 - DNA, 25 bp, Homo sapiens
agaggagccctgctcaagagcaggt

SEQ ID NO: 4447 - DNA, 25 bp, Homo sapiens
gaggagccctgctcaagagcaggtg

SEQ ID NO: 4448 - DNA, 25 bp, Homo sapiens
aggagccctgctcaagagcaggtga

SEQ ID NO: 4449 - DNA, 25 bp, Homo sapiens
ggagccctgctcaagagcaggtgat

SEQ ID NO: 4450 - DNA, 25 bp, Homo sapiens
gagccctgctcaagagcaggtgatg

SEQ ID NO: 4451 - DNA, 25 bp, Homo sapiens
agccctgctcaagagcaggtgatgg

SEQ ID NO: 4452 - DNA, 25 bp, Homo sapiens
gccctgctcaagagcaggtgatggg

SEQ ID NO: 4453 - DNA, 25 bp, Homo sapiens
ccctgctcaagagcaggtgatgggg

SEQ ID NO: 4454 - DNA, 25 bp, Homo sapiens
cctgctcaagagcaggtgatggggc

SEQ ID NO: 4455 - DNA, 25 bp, Homo sapiens
ctgctcaagagcaggtgatggggct

SEQ ID NO: 4456 - DNA, 25 bp, Homo sapiens
tgctcaagagcaggtgatggggctg

SEQ ID NO: 4457 - DNA, 25 bp, Homo sapiens
gctcaagagcaggtgatggggctgg

SEQ ID NO: 4458 - DNA, 25 bp, Homo sapiens
ctcaagagcaggtgatggggctggt

SEQ ID NO: 4459 - DNA, 25 bp, Homo sapiens
tcaagagcaggtgatggggctggtg

SEQ ID NO: 4460 - DNA, 25 bp, Homo sapiens
caagagcaggtgatggggctggtgc

SEQ ID NO: 4461 - DNA, 25 bp, Homo sapiens
aagagcaggtgatggggctggtgcc

SEQ ID NO: 4462 - DNA, 25 bp, Homo sapiens
agagcaggtgatggggctggtgccc

SEQ ID NO: 4463 - DNA, 25 bp, Homo sapiens
gagcaggtgatggggctggtgccct

SEQ ID NO: 4464 - DNA, 25 bp, Homo sapiens
agcaggtgatggggctggtgccctg

SEQ ID NO: 4465 - DNA, 25 bp, Homo sapiens
gcaggtgatggggctggtgccctgg

SEQ ID NO: 4466 - DNA, 25 bp, Homo sapiens
caggtgatggggctggtgccctgga

SEQ ID NO: 4467 - DNA, 25 bp, Homo sapiens
aggtgatggggctggtgccctggag

SEQ ID NO: 4468 - DNA, 25 bp, Homo sapiens
ggtgatggggctggtgccctggaga

SEQ ID NO: 4469 - DNA, 25 bp, Homo sapiens
gtgatggggctggtgccctggagac

SEQ ID NO: 4470 - DNA, 25 bp, Homo sapiens
tgatggggctggtgccctggagaca

SEQ ID NO: 4471 - DNA, 25 bp, Homo sapiens
gatggggctggtgccctggagacag

SEQ ID NO: 4472 - DNA, 25 bp, Homo sapiens
atggggctggtgccctggagacaga

SEQ ID NO: 4473 - DNA, 25 bp, Homo sapiens
tggggctggtgccctggagacagag

SEQ ID NO: 4474 - DNA, 25 bp, Homo sapiens
ggggctggtgccctggagacagagc

SEQ ID NO: 4475 - DNA, 25 bp, Homo sapiens
gggctggtgccctggagacagagct

SEQ ID NO: 4476 - DNA, 25 bp, Homo sapiens
ggctggtgccctggagacagagctg

SEQ ID NO: 4477 - DNA, 25 bp, Homo sapiens
gctggtgccctggagacagagctgg

SEQ ID NO: 4478 - DNA, 25 bp, Homo sapiens
ctggtgccctggagacagagctgga

SEQ ID NO: 4479 - DNA, 25 bp, Homo sapiens
tggtgccctggagacagagctggaa

SEQ ID NO: 4480 - DNA, 25 bp, Homo sapiens
ggtgccctggagacagagctggaag

SEQ ID NO: 4481 - DNA, 25 bp, Homo sapiens
gtgccctggagacagagctggaagg

SEQ ID NO: 4482 - DNA, 25 bp, Homo sapiens
tgccctggagacagagctggaagga

SEQ ID NO: 4483 - DNA, 25 bp, Homo sapiens
gccctggagacagagctggaaggac

SEQ ID NO: 4484 - DNA, 25 bp, Homo sapiens
ccctggagacagagctggaaggacc

SEQ ID NO: 4485 - DNA, 25 bp, Homo sapiens
cctggagacagagctggaaggaccc

SEQ ID NO: 4486 - DNA, 25 bp, Homo sapiens
ctggagacagagctggaaggaccca

SEQ ID NO: 4487 - DNA, 25 bp, Homo sapiens
tggagacagagctggaaggacccag

SEQ ID NO: 4488 - DNA, 25 bp, Homo sapiens
ggagacagagctggaaggacccagc

SEQ ID NO: 4489 - DNA, 25 bp, Homo sapiens
gagacagagctggaaggacccagcc

SEQ ID NO: 4490 - DNA, 25 bp, Homo sapiens
agacagagctggaaggacccagcca

SEQ ID NO: 4491 - DNA, 25 bp, Homo sapiens
gacagagctggaaggacccagccag

SEQ ID NO: 4492 - DNA, 25 bp, Homo sapiens
acagagctggaaggacccagccagc

SEQ ID NO: 4493 - DNA, 25 bp, Homo sapiens
cagagctggaaggacccagccagcc

SEQ ID NO: 4494 - DNA, 25 bp, Homo sapiens
agagctggaaggacccagccagcct

SEQ ID NO: 4495 - DNA, 25 bp, Homo sapiens
gagctggaaggacccagccagcctg

SEQ ID NO: 4496 - DNA, 25 bp, Homo sapiens
agctggaaggacccagccagcctgc

SEQ ID NO: 4497 - DNA, 25 bp, Homo sapiens
gctggaaggacccagccagcctgct

SEQ ID NO: 4498 - DNA, 25 bp, Homo sapiens
ctggaaggacccagccagcctgctc

SEQ ID NO: 4499 - DNA, 25 bp, Homo sapiens
tggaaggacccagccagcctgctct

SEQ ID NO: 4500 - DNA, 25 bp, Homo sapiens
ggaaggacccagccagcctgctctg

SEQ ID NO: 4501 - DNA, 25 bp, Homo sapiens
gaaggacccagccagcctgctctgg

SEQ ID NO: 4502 - DNA, 25 bp, Homo sapiens
aaggacccagccagcctgctctgga

SEQ ID NO: 4503 - DNA, 25 bp, Homo sapiens
aggacccagccagcctgctctggag

SEQ ID NO: 4504 - DNA, 25 bp, Homo sapiens
ggacccagccagcctgctctggaga

SEQ ID NO: 4505 - DNA, 25 bp, Homo sapiens
gacccagccagcctgctctggagaa

SEQ ID NO: 4506 - DNA, 25 bp, Homo sapiens
acccagccagcctgctctggagaag

SEQ ID NO: 4507 - DNA, 25 bp, Homo sapiens
cccagccagcctgctctggagaagg

SEQ ID NO: 4508 - DNA, 25 bp, Homo sapiens
ccagccagcctgctctggagaagga

SEQ ID NO: 4509 - DNA, 25 bp, Homo sapiens
cagccagcctgctctggagaaggat

SEQ ID NO: 4510 - DNA, 25 bp, Homo sapiens
agccagcctgctctggagaaggatg

SEQ ID NO: 4511 - DNA, 25 bp, Homo sapiens
gccagcctgctctggagaaggatgc

SEQ ID NO: 4512 - DNA, 25 bp, Homo sapiens
ccagcctgctctggagaaggatgca

SEQ ID NO: 4513 - DNA, 25 bp, Homo sapiens
cagcctgctctggagaaggatgcag

SEQ ID NO: 4514 - DNA, 25 bp, Homo sapiens
agcctgctctggagaaggatgcaga

SEQ ID NO: 4515 - DNA, 25 bp, Homo sapiens
gcctgctctggagaaggatgcagaa

SEQ ID NO: 4516 - DNA, 25 bp, Homo sapiens
cctgctctggagaaggatgcagaaa

SEQ ID NO: 4517 - DNA, 25 bp, Homo sapiens
ctgctctggagaaggatgcagaaag

SEQ ID NO: 4518 - DNA, 25 bp, Homo sapiens
tgctctggagaaggatgcagaaagg

SEQ ID NO: 4519 - DNA, 25 bp, Homo sapiens
gctctggagaaggatgcagaaaggc

SEQ ID NO: 4520 - DNA, 25 bp, Homo sapiens
ctctggagaaggatgcagaaaggcc

SEQ ID NO: 4521 - DNA, 25 bp, Homo sapiens
tctggagaaggatgcagaaaggcct

SEQ ID NO: 4522 - DNA, 25 bp, Homo sapiens
ctggagaaggatgcagaaaggcctc

SEQ ID NO: 4523 - DNA, 25 bp, Homo sapiens
tggagaaggatgcagaaaggcctcg

SEQ ID NO: 4524 - DNA, 25 bp, Homo sapiens
ggagaaggatgcagaaaggcctcgg

SEQ ID NO: 4525 - DNA, 25 bp, Homo sapiens
gagaaggatgcagaaaggcctcgga

SEQ ID NO: 4526 - DNA, 25 bp, Homo sapiens
agaaggatgcagaaaggcctcggat

SEQ ID NO: 4527 - DNA, 25 bp, Homo sapiens
gaaggatgcagaaaggcctcggata

SEQ ID NO: 4528 - DNA, 25 bp, Homo sapiens
aaggatgcagaaaggcctcggatac

SEQ ID NO: 4529 - DNA, 25 bp, Homo sapiens
aggatgcagaaaggcctcggatacg

SEQ ID NO: 4530 - DNA, 25 bp, Homo sapiens
ggatgcagaaaggcctcggatacgg

SEQ ID NO: 4531 - DNA, 25 bp, Homo sapiens
gatgcagaaaggcctcggatacgga

SEQ ID NO: 4532 - DNA, 25 bp, Homo sapiens
atgcagaaaggcctcggatacggaa

SEQ ID NO: 4533 - DNA, 25 bp, Homo sapiens
tgcagaaaggcctcggatacggaag

SEQ ID NO: 4534 - DNA, 25 bp, Homo sapiens
gcagaaaggcctcggatacggaagg

SEQ ID NO: 4535 - DNA, 25 bp, Homo sapiens
cagaaaggcctcggatacggaagga

SEQ ID NO: 4536 - DNA, 25 bp, Homo sapiens
agaaaggcctcggatacggaaggag

SEQ ID NO: 4537 - DNA, 25 bp, Homo sapiens
gaaaggcctcggatacggaaggaga

SEQ ID NO: 4538 - DNA, 25 bp, Homo sapiens
aaaggcctcggatacggaaggagaa

SEQ ID NO: 4539 - DNA, 25 bp, Homo sapiens
aaggcctcggatacggaaggagaac

SEQ ID NO: 4540 - DNA, 25 bp, Homo sapiens
aggcctcggatacggaaggagaacc

SEQ ID NO: 4541 - DNA, 25 bp, Homo sapiens
ggcctcggatacggaaggagaacca

SEQ ID NO: 4542 - DNA, 25 bp, Homo sapiens
gcctcggatacggaaggagaaccaa

SEQ ID NO: 4543 - DNA, 25 bp, Homo sapiens
cctcggatacggaaggagaaccaag

SEQ ID NO: 4544 - DNA, 25 bp, Homo sapiens
ctcggatacggaaggagaaccaaga

SEQ ID NO: 4545 - DNA, 25 bp, Homo sapiens
tcggatacggaaggagaaccaagac

SEQ ID NO: 4546 - DNA, 25 bp, Homo sapiens
cggatacggaaggagaaccaagacg

SEQ ID NO: 4547 - DNA, 25 bp, Homo sapiens
ggatacggaaggagaaccaagacgg

SEQ ID NO: 4548 - DNA, 25 bp, Homo sapiens
gatacggaaggagaaccaagacggg

SEQ ID NO: 4549 - DNA, 25 bp, Homo sapiens
atacggaaggagaaccaagacgggc

SEQ ID NO: 4550 - DNA, 25 bp, Homo sapiens
tacggaaggagaaccaagacgggcc

SEQ ID NO: 4551 - DNA, 25 bp, Homo sapiens
acggaaggagaaccaagacgggcca

SEQ ID NO: 4552 - DNA, 25 bp, Homo sapiens
cggaaggagaaccaagacgggccag

SEQ ID NO: 4553 - DNA, 25 bp, Homo sapiens
ggaaggagaaccaagacgggccagc

SEQ ID NO: 4554 - DNA, 25 bp, Homo sapiens
gaaggagaaccaagacgggccagcc

SEQ ID NO: 4555 - DNA, 25 bp, Homo sapiens
aaggagaaccaagacgggccagccc

SEQ ID NO: 4556 - DNA, 25 bp, Homo sapiens
aggagaaccaagacgggccagcccc

SEQ ID NO: 4557 - DNA, 25 bp, Homo sapiens
ggagaaccaagacgggccagccccg

SEQ ID NO: 4558 - DNA, 25 bp, Homo sapiens
gagaaccaagacgggccagccccgc

SEQ ID NO: 4559 - DNA, 25 bp, Homo sapiens
agaaccaagacgggccagccccgca

SEQ ID NO: 4560 - DNA, 25 bp, Homo sapiens
gaaccaagacgggccagccccgcag

SEQ ID NO: 4561 - DNA, 25 bp, Homo sapiens
aaccaagacgggccagccccgcagg

SEQ ID NO: 4562 - DNA, 25 bp, Homo sapiens
accaagacgggccagccccgcagga

SEQ ID NO: 4563 - DNA, 25 bp, Homo sapiens
ccaagacgggccagccccgcaggag

SEQ ID NO: 4564 - DNA, 25 bp, Homo sapiens
caagacgggccagccccgcaggagg

SEQ ID NO: 4565 - DNA, 25 bp, Homo sapiens
aagacgggccagccccgcaggagga

SEQ ID NO: 4566 - DNA, 25 bp, Homo sapiens
agacgggccagccccgcaggaggag

SEQ ID NO: 4567 - DNA, 25 bp, Homo sapiens
gacgggccagccccgcaggaggagg

SEQ ID NO: 4568 - DNA, 25 bp, Homo sapiens
acgggccagccccgcaggaggaggg

SEQ ID NO: 4569 - DNA, 25 bp, Homo sapiens
cgggccagccccgcaggaggagggc

SEQ ID NO: 4570 - DNA, 25 bp, Homo sapiens
gggccagccccgcaggaggagggca

SEQ ID NO: 4571 - DNA, 25 bp, Homo sapiens
ggccagccccgcaggaggagggcaa

SEQ ID NO: 4572 - DNA, 25 bp, Homo sapiens
gccagccccgcaggaggagggcaaa

SEQ ID NO: 4573 - DNA, 25 bp, Homo sapiens
ccagccccgcaggaggagggcaaag

SEQ ID NO: 4574 - DNA, 25 bp, Homo sapiens
cagccccgcaggaggagggcaaagg

SEQ ID NO: 4575 - DNA, 25 bp, Homo sapiens
agccccgcaggaggagggcaaagga

SEQ ID NO: 4576 - DNA, 25 bp, Homo sapiens
gccccgcaggaggagggcaaaggag

SEQ ID NO: 4577 - DNA, 25 bp, Homo sapiens
ccccgcaggaggagggcaaaggagg

SEQ ID NO: 4578 - DNA, 25 bp, Homo sapiens
cccgcaggaggagggcaaaggaggc

SEQ ID NO: 4579 - DNA, 25 bp, Homo sapiens
ccgcaggaggagggcaaaggaggcc

SEQ ID NO: 4580 - DNA, 25 bp, Homo sapiens
cgcaggaggagggcaaaggaggcca

SEQ ID NO: 4581 - DNA, 25 bp, Homo sapiens
gcaggaggagggcaaaggaggccag

SEQ ID NO: 4582 - DNA, 25 bp, Homo sapiens
caggaggagggcaaaggaggccaga

SEQ ID NO: 4583 - DNA, 25 bp, Homo sapiens
aggaggagggcaaaggaggccagag

SEQ ID NO: 4584 - DNA, 25 bp, Homo sapiens
ggaggagggcaaaggaggccagagc

SEQ ID NO: 4585 - DNA, 25 bp, Homo sapiens
gaggagggcaaaggaggccagagca

SEQ ID NO: 4586 - DNA, 25 bp, Homo sapiens
aggagggcaaaggaggccagagcag

SEQ ID NO: 4587 - DNA, 25 bp, Homo sapiens
ggagggcaaaggaggccagagcaga

SEQ ID NO: 4588 - DNA, 25 bp, Homo sapiens
gagggcaaaggaggccagagcagag

SEQ ID NO: 4589 - DNA, 25 bp, Homo sapiens
agggcaaaggaggccagagcagaga

SEQ ID NO: 4590 - DNA, 25 bp, Homo sapiens
gggcaaaggaggccagagcagagac

SEQ ID NO: 4591 - DNA, 25 bp, Homo sapiens
ggcaaaggaggccagagcagagact

SEQ ID NO: 4592 - DNA, 25 bp, Homo sapiens
gcaaaggaggccagagcagagactc

SEQ ID NO: 4593 - DNA, 25 bp, Homo sapiens
caaaggaggccagagcagagactca

SEQ ID NO: 4594 - DNA, 25 bp, Homo sapiens
aaaggaggccagagcagagactcag

SEQ ID NO: 4595 - DNA, 25 bp, Homo sapiens
aaggaggccagagcagagactcaga

SEQ ID NO: 4596 - DNA, 25 bp, Homo sapiens
aggaggccagagcagagactcagac

SEQ ID NO: 4597 - DNA, 25 bp, Homo sapiens
ggaggccagagcagagactcagacc

SEQ ID NO: 4598 - DNA, 25 bp, Homo sapiens
gaggccagagcagagactcagacca

SEQ ID NO: 4599 - DNA, 25 bp, Homo sapiens
aggccagagcagagactcagaccag

SEQ ID NO: 4600 - DNA, 25 bp, Homo sapiens
ggccagagcagagactcagaccagg

SEQ ID NO: 4601 - DNA, 25 bp, Homo sapiens
gccagagcagagactcagaccaggc

SEQ ID NO: 4602 - DNA, 25 bp, Homo sapiens
ccagagcagagactcagaccaggct

SEQ ID NO: 4603 - DNA, 25 bp, Homo sapiens
cagagcagagactcagaccaggctc

SEQ ID NO: 4604 - DNA, 25 bp, Homo sapiens
agagcagagactcagaccaggctcc

SEQ ID NO: 4605 - DNA, 25 bp, Homo sapiens
gagcagagactcagaccaggctcct

SEQ ID NO: 4606 - DNA, 25 bp, Homo sapiens
agcagagactcagaccaggctcctg

SEQ ID NO: 4607 - DNA, 25 bp, Homo sapiens
gcagagactcagaccaggctcctga

SEQ ID NO: 4608 - DNA, 25 bp, Homo sapiens
cagagactcagaccaggctcctgag

SEQ ID NO: 4609 - DNA, 25 bp, Homo sapiens
agagactcagaccaggctcctgagg

SEQ ID NO: 4610 - DNA, 25 bp, Homo sapiens
gagactcagaccaggctcctgagga

SEQ ID NO: 4611 - DNA, 25 bp, Homo sapiens
agactcagaccaggctcctgaggac

SEQ ID NO: 4612 - DNA, 25 bp, Homo sapiens
gactcagaccaggctcctgaggaca

SEQ ID NO: 4613 - DNA, 25 bp, Homo sapiens
actcagaccaggctcctgaggacag

SEQ ID NO: 4614 - DNA, 25 bp, Homo sapiens
ctcagaccaggctcctgaggacaga

SEQ ID NO: 4615 - DNA, 25 bp, Homo sapiens
tcagaccaggctcctgaggacagat

SEQ ID NO: 4616 - DNA, 25 bp, Homo sapiens
cagaccaggctcctgaggacagatg

SEQ ID NO: 4617 - DNA, 25 bp, Homo sapiens
agaccaggctcctgaggacagatgg

SEQ ID NO: 4618 - DNA, 25 bp, Homo sapiens
gaccaggctcctgaggacagatggt

SEQ ID NO: 4619 - DNA, 25 bp, Homo sapiens
accaggctcctgaggacagatggta

SEQ ID NO: 4620 - DNA, 25 bp, Homo sapiens
ccaggctcctgaggacagatggtat

SEQ ID NO: 4621 - DNA, 25 bp, Homo sapiens
caggctcctgaggacagatggtatg

SEQ ID NO: 4622 - DNA, 25 bp, Homo sapiens
aggctcctgaggacagatggtatga

SEQ ID NO: 4623 - DNA, 25 bp, Homo sapiens
ggctcctgaggacagatggtatgag

SEQ ID NO: 4624 - DNA, 25 bp, Homo sapiens
gctcctgaggacagatggtatgagg

SEQ ID NO: 4625 - DNA, 25 bp, Homo sapiens
ctcctgaggacagatggtatgaggc

SEQ ID NO: 4626 - DNA, 25 bp, Homo sapiens
tcctgaggacagatggtatgaggca

SEQ ID NO: 4627 - DNA, 25 bp, Homo sapiens
cctgaggacagatggtatgaggcag

SEQ ID NO: 4628 - DNA, 25 bp, Homo sapiens
ctgaggacagatggtatgaggcaga

SEQ ID NO: 4629 - DNA, 25 bp, Homo sapiens
tgaggacagatggtatgaggcagag

SEQ ID NO: 4630 - DNA, 25 bp, Homo sapiens
gaggacagatggtatgaggcagaga

SEQ ID NO: 4631 - DNA, 25 bp, Homo sapiens
aggacagatggtatgaggcagagaa

SEQ ID NO: 4632 - DNA, 25 bp, Homo sapiens
ggacagatggtatgaggcagagaaa

SEQ ID NO: 4633 - DNA, 25 bp, Homo sapiens
gacagatggtatgaggcagagaaag

SEQ ID NO: 4634 - DNA, 25 bp, Homo sapiens
acagatggtatgaggcagagaaagt

SEQ ID NO: 4635 - DNA, 25 bp, Homo sapiens
cagatggtatgaggcagagaaagtc

SEQ ID NO: 4636 - DNA, 25 bp, Homo sapiens
agatggtatgaggcagagaaagtct

SEQ ID NO: 4637 - DNA, 25 bp, Homo sapiens
gatggtatgaggcagagaaagtctg

SEQ ID NO: 4638 - DNA, 25 bp, Homo sapiens
atggtatgaggcagagaaagtctgg

SEQ ID NO: 4639 - DNA, 25 bp, Homo sapiens
tggtatgaggcagagaaagtctggc

SEQ ID NO: 4640 - DNA, 25 bp, Homo sapiens
ggtatgaggcagagaaagtctggct

SEQ ID NO: 4641 - DNA, 25 bp, Homo sapiens
gtatgaggcagagaaagtctggctg

SEQ ID NO: 4642 - DNA, 25 bp, Homo sapiens
tatgaggcagagaaagtctggctgg

SEQ ID NO: 4643 - DNA, 25 bp, Homo sapiens
atgaggcagagaaagtctggctggc

SEQ ID NO: 4644 - DNA, 25 bp, Homo sapiens
tgaggcagagaaagtctggctggct

SEQ ID NO: 4645 - DNA, 25 bp, Homo sapiens
gaggcagagaaagtctggctggctc

SEQ ID NO: 4646 - DNA, 25 bp, Homo sapiens
aggcagagaaagtctggctggctca

SEQ ID NO: 4647 - DNA, 25 bp, Homo sapiens
ggcagagaaagtctggctggctcag

SEQ ID NO: 4648 - DNA, 25 bp, Homo sapiens
gcagagaaagtctggctggctcaga

SEQ ID NO: 4649 - DNA, 25 bp, Homo sapiens
cagagaaagtctggctggctcagaa

SEQ ID NO: 4650 - DNA, 25 bp, Homo sapiens
agagaaagtctggctggctcagaag

SEQ ID NO: 4651 - DNA, 25 bp, Homo sapiens
gagaaagtctggctggctcagaagg

SEQ ID NO: 4652 - DNA, 25 bp, Homo sapiens
agaaagtctggctggctcagaagga

SEQ ID NO: 4653 - DNA, 25 bp, Homo sapiens
gaaagtctggctggctcagaaggat

SEQ ID NO: 4654 - DNA, 25 bp, Homo sapiens
aaagtctggctggctcagaaggatg

SEQ ID NO: 4655 - DNA, 25 bp, Homo sapiens
aagtctggctggctcagaaggatgg

SEQ ID NO: 4656 - DNA, 25 bp, Homo sapiens
agtctggctggctcagaaggatgga

SEQ ID NO: 4657 - DNA, 25 bp, Homo sapiens
gtctggctggctcagaaggatggat

SEQ ID NO: 4658 - DNA, 25 bp, Homo sapiens
tctggctggctcagaaggatggatt

SEQ ID NO: 4659 - DNA, 25 bp, Homo sapiens
ctggctggctcagaaggatggattt

SEQ ID NO: 4660 - DNA, 25 bp, Homo sapiens
tggctggctcagaaggatggattta

SEQ ID NO: 4661 - DNA, 25 bp, Homo sapiens
ggctggctcagaaggatggatttac

SEQ ID NO: 4662 - DNA, 25 bp, Homo sapiens
gctggctcagaaggatggatttact

SEQ ID NO: 4663 - DNA, 25 bp, Homo sapiens
ctggctcagaaggatggatttactc

SEQ ID NO: 4664 - DNA, 25 bp, Homo sapiens
tggctcagaaggatggatttactct

SEQ ID NO: 4665 - DNA, 25 bp, Homo sapiens
ggctcagaaggatggatttactctt

SEQ ID NO: 4666 - DNA, 25 bp, Homo sapiens
gctcagaaggatggatttactcttg

SEQ ID NO: 4667 - DNA, 25 bp, Homo sapiens
ctcagaaggatggatttactcttgc

SEQ ID NO: 4668 - DNA, 25 bp, Homo sapiens
tcagaaggatggatttactcttgct

SEQ ID NO: 4669 - DNA, 25 bp, Homo sapiens
cagaaggatggatttactcttgcta

SEQ ID NO: 4670 - DNA, 25 bp, Homo sapiens
agaaggatggatttactcttgctac

SEQ ID NO: 4671 - DNA, 25 bp, Homo sapiens
gaaggatggatttactcttgctacg

SEQ ID NO: 4672 - DNA, 25 bp, Homo sapiens
aaggatggatttactcttgctacgg

SEQ ID NO: 4673 - DNA, 25 bp, Homo sapiens
aggatggatttactcttgctacggt

SEQ ID NO: 4674 - DNA, 25 bp, Homo sapiens
ggatggatttactcttgctacggtg

SEQ ID NO: 4675 - DNA, 25 bp, Homo sapiens
gatggatttactcttgctacggtgc

SEQ ID NO: 4676 - DNA, 25 bp, Homo sapiens
atggatttactcttgctacggtgct

SEQ ID NO: 4677 - DNA, 25 bp, Homo sapiens
tggatttactcttgctacggtgcta

SEQ ID NO: 4678 - DNA, 25 bp, Homo sapiens
ggatttactcttgctacggtgctaa

SEQ ID NO: 4679 - DNA, 25 bp, Homo sapiens
gatttactcttgctacggtgctaaa

SEQ ID NO: 4680 - DNA, 25 bp, Homo sapiens
atttactcttgctacggtgctaaag

SEQ ID NO: 4681 - DNA, 25 bp, Homo sapiens
tttactcttgctacggtgctaaagc

SEQ ID NO: 4682 - DNA, 25 bp, Homo sapiens
ttactcttgctacggtgctaaagcc

SEQ ID NO: 4683 - DNA, 25 bp, Homo sapiens
tactcttgctacggtgctaaagcca

SEQ ID NO: 4684 - DNA, 25 bp, Homo sapiens
actcttgctacggtgctaaagccag

SEQ ID NO: 4685 - DNA, 25 bp, Homo sapiens
ctcttgctacggtgctaaagccaga

SEQ ID NO: 4686 - DNA, 25 bp, Homo sapiens
tcttgctacggtgctaaagccagat

SEQ ID NO: 4687 - DNA, 25 bp, Homo sapiens
cttgctacggtgctaaagccagatg

SEQ ID NO: 4688 - DNA, 25 bp, Homo sapiens
ttgctacggtgctaaagccagatga

SEQ ID NO: 4689 - DNA, 25 bp, Homo sapiens
tgctacggtgctaaagccagatgag

SEQ ID NO: 4690 - DNA, 25 bp, Homo sapiens
gctacggtgctaaagccagatgagg

SEQ ID NO: 4691 - DNA, 25 bp, Homo sapiens
ctacggtgctaaagccagatgaggg

SEQ ID NO: 4692 - DNA, 25 bp, Homo sapiens
tacggtgctaaagccagatgaggga

SEQ ID NO: 4693 - DNA, 25 bp, Homo sapiens
acggtgctaaagccagatgagggaa

SEQ ID NO: 4694 - DNA, 25 bp, Homo sapiens
cggtgctaaagccagatgagggaac

SEQ ID NO: 4695 - DNA, 25 bp, Homo sapiens
ggtgctaaagccagatgagggaaca

SEQ ID NO: 4696 - DNA, 25 bp, Homo sapiens
gtgctaaagccagatgagggaacag

SEQ ID NO: 4697 - DNA, 25 bp, Homo sapiens
tgctaaagccagatgagggaacagc

SEQ ID NO: 4698 - DNA, 25 bp, Homo sapiens
gctaaagccagatgagggaacagca

SEQ ID NO: 4699 - DNA, 25 bp, Homo sapiens
ctaaagccagatgagggaacagcag

SEQ ID NO: 4700 - DNA, 25 bp, Homo sapiens
taaagccagatgagggaacagcaga

SEQ ID NO: 4701 - DNA, 25 bp, Homo sapiens
aaagccagatgagggaacagcagac

SEQ ID NO: 4702 - DNA, 25 bp, Homo sapiens
aagccagatgagggaacagcagacc

SEQ ID NO: 4703 - DNA, 25 bp, Homo sapiens
agccagatgagggaacagcagacct

SEQ ID NO: 4704 - DNA, 25 bp, Homo sapiens
gccagatgagggaacagcagacctg

SEQ ID NO: 4705 - DNA, 25 bp, Homo sapiens
ccagatgagggaacagcagacctgc

SEQ ID NO: 4706 - DNA, 25 bp, Homo sapiens
cagatgagggaacagcagacctgcc

SEQ ID NO: 4707 - DNA, 25 bp, Homo sapiens
agatgagggaacagcagacctgcca

SEQ ID NO: 4708 - DNA, 25 bp, Homo sapiens
gatgagggaacagcagacctgccag

SEQ ID NO: 4709 - DNA, 25 bp, Homo sapiens
atgagggaacagcagacctgccagc

SEQ ID NO: 4710 - DNA, 25 bp, Homo sapiens
tgagggaacagcagacctgccagca

SEQ ID NO: 4711 - DNA, 25 bp, Homo sapiens
gagggaacagcagacctgccagcag

SEQ ID NO: 4712 - DNA, 25 bp, Homo sapiens
agggaacagcagacctgccagcagg

SEQ ID NO: 4713 - DNA, 25 bp, Homo sapiens
gggaacagcagacctgccagcagga

SEQ ID NO: 4714 - DNA, 25 bp, Homo sapiens
ggaacagcagacctgccagcaggaa

SEQ ID NO: 4715 - DNA, 25 bp, Homo sapiens
gaacagcagacctgccagcaggaag

SEQ ID NO: 4716 - DNA, 25 bp, Homo sapiens
aacagcagacctgccagcaggaagg

SEQ ID NO: 4717 - DNA, 25 bp, Homo sapiens
acagcagacctgccagcaggaaggg

SEQ ID NO: 4718 - DNA, 25 bp, Homo sapiens
cagcagacctgccagcaggaagggt

SEQ ID NO: 4719 - DNA, 25 bp, Homo sapiens
agcagacctgccagcaggaagggtg

SEQ ID NO: 4720 - DNA, 25 bp, Homo sapiens
gcagacctgccagcaggaagggtga

SEQ ID NO: 4721 - DNA, 25 bp, Homo sapiens
cagacctgccagcaggaagggtgag

SEQ ID NO: 4722 - DNA, 25 bp, Homo sapiens
agacctgccagcaggaagggtgaga

SEQ ID NO: 4723 - DNA, 25 bp, Homo sapiens
gacctgccagcaggaagggtgagac

SEQ ID NO: 4724 - DNA, 25 bp, Homo sapiens
acctgccagcaggaagggtgagact

SEQ ID NO: 4725 - DNA, 25 bp, Homo sapiens
cctgccagcaggaagggtgagactt

SEQ ID NO: 4726 - DNA, 25 bp, Homo sapiens
ctgccagcaggaagggtgagacttt

SEQ ID NO: 4727 - DNA, 25 bp, Homo sapiens
tgccagcaggaagggtgagactttg

SEQ ID NO: 4728 - DNA, 25 bp, Homo sapiens
gccagcaggaagggtgagactttgc

SEQ ID NO: 4729 - DNA, 25 bp, Homo sapiens
ccagcaggaagggtgagactttgca

SEQ ID NO: 4730 - DNA, 25 bp, Homo sapiens
cagcaggaagggtgagactttgcat

SEQ ID NO: 4731 - DNA, 25 bp, Homo sapiens
agcaggaagggtgagactttgcatt

SEQ ID NO: 4732 - DNA, 25 bp, Homo sapiens
gcaggaagggtgagactttgcattg

SEQ ID NO: 4733 - DNA, 25 bp, Homo sapiens
caggaagggtgagactttgcattga

SEQ ID NO: 4734 - DNA, 25 bp, Homo sapiens
aggaagggtgagactttgcattgat

SEQ ID NO: 4735 - DNA, 25 bp, Homo sapiens
ggaagggtgagactttgcattgatg

SEQ ID NO: 4736 - DNA, 25 bp, Homo sapiens
gaagggtgagactttgcattgatgc

SEQ ID NO: 4737 - DNA, 25 bp, Homo sapiens
aagggtgagactttgcattgatgct

SEQ ID NO: 4738 - DNA, 25 bp, Homo sapiens
agggtgagactttgcattgatgctg

SEQ ID NO: 4739 - DNA, 25 bp, Homo sapiens
gggtgagactttgcattgatgctga

SEQ ID NO: 4740 - DNA, 25 bp, Homo sapiens
ggtgagactttgcattgatgctgac

SEQ ID NO: 4741 - DNA, 25 bp, Homo sapiens
gtgagactttgcattgatgctgaca

SEQ ID NO: 4742 - DNA, 25 bp, Homo sapiens
tgagactttgcattgatgctgacaa

SEQ ID NO: 4743 - DNA, 25 bp, Homo sapiens
gagactttgcattgatgctgacaaa

SEQ ID NO: 4744 - DNA, 25 bp, Homo sapiens
agactttgcattgatgctgacaaaa

SEQ ID NO: 4745 - DNA, 25 bp, Homo sapiens
gactttgcattgatgctgacaaaac

SEQ ID NO: 4746 - DNA, 25 bp, Homo sapiens
actttgcattgatgctgacaaaacc

SEQ ID NO: 4747 - DNA, 25 bp, Homo sapiens
ctttgcattgatgctgacaaaacca

SEQ ID NO: 4748 - DNA, 25 bp, Homo sapiens
tttgcattgatgctgacaaaaccat

SEQ ID NO: 4749 - DNA, 25 bp, Homo sapiens
ttgcattgatgctgacaaaaccatc

SEQ ID NO: 4750 - DNA, 25 bp, Homo sapiens
tgcattgatgctgacaaaaccatca

SEQ ID NO: 4751 - DNA, 25 bp, Homo sapiens
gcattgatgctgacaaaaccatcac

SEQ ID NO: 4752 - DNA, 25 bp, Homo sapiens
cattgatgctgacaaaaccatcact

SEQ ID NO: 4753 - DNA, 25 bp, Homo sapiens
attgatgctgacaaaaccatcactg

SEQ ID NO: 4754 - DNA, 25 bp, Homo sapiens
ttgatgctgacaaaaccatcactga

SEQ ID NO: 4755 - DNA, 25 bp, Homo sapiens
tgatgctgacaaaaccatcactgag

SEQ ID NO: 4756 - DNA, 25 bp, Homo sapiens
gatgctgacaaaaccatcactgagg

SEQ ID NO: 4757 - DNA, 25 bp, Homo sapiens
atgctgacaaaaccatcactgaggt

SEQ ID NO: 4758 - DNA, 25 bp, Homo sapiens
tgctgacaaaaccatcactgaggtg

SEQ ID NO: 4759 - DNA, 25 bp, Homo sapiens
gctgacaaaaccatcactgaggtgg

SEQ ID NO: 4760 - DNA, 25 bp, Homo sapiens
ctgacaaaaccatcactgaggtgga

SEQ ID NO: 4761 - DNA, 25 bp, Homo sapiens
tgacaaaaccatcactgaggtggat

SEQ ID NO: 4762 - DNA, 25 bp, Homo sapiens
gacaaaaccatcactgaggtggatg

SEQ ID NO: 4763 - DNA, 25 bp, Homo sapiens
acaaaaccatcactgaggtggatga

SEQ ID NO: 4764 - DNA, 25 bp, Homo sapiens
caaaaccatcactgaggtggatgag

SEQ ID NO: 4765 - DNA, 25 bp, Homo sapiens
aaaaccatcactgaggtggatgagg

SEQ ID NO: 4766 - DNA, 25 bp, Homo sapiens
aaaccatcactgaggtggatgagga

SEQ ID NO: 4767 - DNA, 25 bp, Homo sapiens
aaccatcactgaggtggatgaggag

SEQ ID NO: 4768 - DNA, 25 bp, Homo sapiens
accatcactgaggtggatgaggagc

SEQ ID NO: 4769 - DNA, 25 bp, Homo sapiens
ccatcactgaggtggatgaggagca

SEQ ID NO: 4770 - DNA, 25 bp, Homo sapiens
catcactgaggtggatgaggagcat

SEQ ID NO: 4771 - DNA, 25 bp, Homo sapiens
atcactgaggtggatgaggagcatg

SEQ ID NO: 4772 - DNA, 25 bp, Homo sapiens
tcactgaggtggatgaggagcatgt

SEQ ID NO: 4773 - DNA, 25 bp, Homo sapiens
cactgaggtggatgaggagcatgtc

SEQ ID NO: 4774 - DNA, 25 bp, Homo sapiens
actgaggtggatgaggagcatgtcc

SEQ ID NO: 4775 - DNA, 25 bp, Homo sapiens
ctgaggtggatgaggagcatgtcca

SEQ ID NO: 4776 - DNA, 25 bp, Homo sapiens
tgaggtggatgaggagcatgtccat

SEQ ID NO: 4777 - DNA, 25 bp, Homo sapiens
gaggtggatgaggagcatgtccatc

SEQ ID NO: 4778 - DNA, 25 bp, Homo sapiens
aggtggatgaggagcatgtccatcg

SEQ ID NO: 4779 - DNA, 25 bp, Homo sapiens
ggtggatgaggagcatgtccatcgg

SEQ ID NO: 4780 - DNA, 25 bp, Homo sapiens
gtggatgaggagcatgtccatcggg

SEQ ID NO: 4781 - DNA, 25 bp, Homo sapiens
tggatgaggagcatgtccatcgggc

SEQ ID NO: 4782 - DNA, 25 bp, Homo sapiens
ggatgaggagcatgtccatcgggcc

SEQ ID NO: 4783 - DNA, 25 bp, Homo sapiens
gatgaggagcatgtccatcgggcca

SEQ ID NO: 4784 - DNA, 25 bp, Homo sapiens
atgaggagcatgtccatcgggccaa

SEQ ID NO: 4785 - DNA, 25 bp, Homo sapiens
tgaggagcatgtccatcgggccaac

SEQ ID NO: 4786 - DNA, 25 bp, Homo sapiens
gaggagcatgtccatcgggccaacc

SEQ ID NO: 4787 - DNA, 25 bp, Homo sapiens
aggagcatgtccatcgggccaaccc

SEQ ID NO: 4788 - DNA, 25 bp, Homo sapiens
ggagcatgtccatcgggccaaccct

SEQ ID NO: 4789 - DNA, 25 bp, Homo sapiens
gagcatgtccatcgggccaaccctc

SEQ ID NO: 4790 - DNA, 25 bp, Homo sapiens
agcatgtccatcgggccaaccctcc

SEQ ID NO: 4791 - DNA, 25 bp, Homo sapiens
gcatgtccatcgggccaaccctcct

SEQ ID NO: 4792 - DNA, 25 bp, Homo sapiens
catgtccatcgggccaaccctcctg

SEQ ID NO: 4793 - DNA, 25 bp, Homo sapiens
atgtccatcgggccaaccctcctga

SEQ ID NO: 4794 - DNA, 25 bp, Homo sapiens
tgtccatcgggccaaccctcctgag

SEQ ID NO: 4795 - DNA, 25 bp, Homo sapiens
gtccatcgggccaaccctcctgagc

SEQ ID NO: 4796 - DNA, 25 bp, Homo sapiens
tccatcgggccaaccctcctgagct

SEQ ID NO: 4797 - DNA, 25 bp, Homo sapiens
ccatcgggccaaccctcctgagctg

SEQ ID NO: 4798 - DNA, 25 bp, Homo sapiens
catcgggccaaccctcctgagctgg

SEQ ID NO: 4799 - DNA, 25 bp, Homo sapiens
atcgggccaaccctcctgagctgga

SEQ ID NO: 4800 - DNA, 25 bp, Homo sapiens
tcgggccaaccctcctgagctggac

SEQ ID NO: 4801 - DNA, 25 bp, Homo sapiens
cgggccaaccctcctgagctggacc

SEQ ID NO: 4802 - DNA, 25 bp, Homo sapiens
gggccaaccctcctgagctggacca

SEQ ID NO: 4803 - DNA, 25 bp, Homo sapiens
ggccaaccctcctgagctggaccag

SEQ ID NO: 4804 - DNA, 25 bp, Homo sapiens
gccaaccctcctgagctggaccagg

SEQ ID NO: 4805 - DNA, 25 bp, Homo sapiens
ccaaccctcctgagctggaccaggt

SEQ ID NO: 4806 - DNA, 25 bp, Homo sapiens
caaccctcctgagctggaccaggtc

SEQ ID NO: 4807 - DNA, 25 bp, Homo sapiens
aaccctcctgagctggaccaggtcg

SEQ ID NO: 4808 - DNA, 25 bp, Homo sapiens
accctcctgagctggaccaggtcga

SEQ ID NO: 4809 - DNA, 25 bp, Homo sapiens
ccctcctgagctggaccaggtcgag

SEQ ID NO: 4810 - DNA, 25 bp, Homo sapiens
cctcctgagctggaccaggtcgagg

SEQ ID NO: 4811 - DNA, 25 bp, Homo sapiens
ctcctgagctggaccaggtcgagga

SEQ ID NO: 4812 - DNA, 25 bp, Homo sapiens
tcctgagctggaccaggtcgaggac

SEQ ID NO: 4813 - DNA, 25 bp, Homo sapiens
cctgagctggaccaggtcgaggacc

SEQ ID NO: 4814 - DNA, 25 bp, Homo sapiens
ctgagctggaccaggtcgaggacct

SEQ ID NO: 4815 - DNA, 25 bp, Homo sapiens
tgagctggaccaggtcgaggacctg

SEQ ID NO: 4816 - DNA, 25 bp, Homo sapiens
gagctggaccaggtcgaggacctgg

SEQ ID NO: 4817 - DNA, 25 bp, Homo sapiens
agctggaccaggtcgaggacctggc

SEQ ID NO: 4818 - DNA, 25 bp, Homo sapiens
gctggaccaggtcgaggacctggcc

SEQ ID NO: 4819 - DNA, 25 bp, Homo sapiens
ctggaccaggtcgaggacctggcct

SEQ ID NO: 4820 - DNA, 25 bp, Homo sapiens
tggaccaggtcgaggacctggcctc

SEQ ID NO: 4821 - DNA, 25 bp, Homo sapiens
ggaccaggtcgaggacctggcctct

SEQ ID NO: 4822 - DNA, 25 bp, Homo sapiens
gaccaggtcgaggacctggcctctc

SEQ ID NO: 4823 - DNA, 25 bp, Homo sapiens
accaggtcgaggacctggcctctct

SEQ ID NO: 4824 - DNA, 25 bp, Homo sapiens
ccaggtcgaggacctggcctctctc

SEQ ID NO: 4825 - DNA, 25 bp, Homo sapiens
caggtcgaggacctggcctctctca

SEQ ID NO: 4826 - DNA, 25 bp, Homo sapiens
aggtcgaggacctggcctctctcat

SEQ ID NO: 4827 - DNA, 25 bp, Homo sapiens
ggtcgaggacctggcctctctcatc

SEQ ID NO: 4828 - DNA, 25 bp, Homo sapiens
gtcgaggacctggcctctctcatca

SEQ ID NO: 4829 - DNA, 25 bp, Homo sapiens
tcgaggacctggcctctctcatcag

SEQ ID NO: 4830 - DNA, 25 bp, Homo sapiens
cgaggacctggcctctctcatcagt

SEQ ID NO: 4831 - DNA, 25 bp, Homo sapiens
gaggacctggcctctctcatcagtg

SEQ ID NO: 4832 - DNA, 25 bp, Homo sapiens
aggacctggcctctctcatcagtgt

SEQ ID NO: 4833 - DNA, 25 bp, Homo sapiens
ggacctggcctctctcatcagtgtc

SEQ ID NO: 4834 - DNA, 25 bp, Homo sapiens
gacctggcctctctcatcagtgtca

SEQ ID NO: 4835 - DNA, 25 bp, Homo sapiens
acctggcctctctcatcagtgtcaa

SEQ ID NO: 4836 - DNA, 25 bp, Homo sapiens
cctggcctctctcatcagtgtcaac

SEQ ID NO: 4837 - DNA, 25 bp, Homo sapiens
ctggcctctctcatcagtgtcaacg

SEQ ID NO: 4838 - DNA, 25 bp, Homo sapiens
tggcctctctcatcagtgtcaacga

SEQ ID NO: 4839 - DNA, 25 bp, Homo sapiens
ggcctctctcatcagtgtcaacgaa

SEQ ID NO: 4840 - DNA, 25 bp, Homo sapiens
gcctctctcatcagtgtcaacgaat

SEQ ID NO: 4841 - DNA, 25 bp, Homo sapiens
cctctctcatcagtgtcaacgaatc

SEQ ID NO: 4842 - DNA, 25 bp, Homo sapiens
ctctctcatcagtgtcaacgaatcc

SEQ ID NO: 4843 - DNA, 25 bp, Homo sapiens
tctctcatcagtgtcaacgaatcca

SEQ ID NO: 4844 - DNA, 25 bp, Homo sapiens
ctctcatcagtgtcaacgaatccag

SEQ ID NO: 4845 - DNA, 25 bp, Homo sapiens
tctcatcagtgtcaacgaatccagt

SEQ ID NO: 4846 - DNA, 25 bp, Homo sapiens
ctcatcagtgtcaacgaatccagtg

SEQ ID NO: 4847 - DNA, 25 bp, Homo sapiens
tcatcagtgtcaacgaatccagtgt

SEQ ID NO: 4848 - DNA, 25 bp, Homo sapiens
catcagtgtcaacgaatccagtgtc

SEQ ID NO: 4849 - DNA, 25 bp, Homo sapiens
atcagtgtcaacgaatccagtgtcc

SEQ ID NO: 4850 - DNA, 25 bp, Homo sapiens
tcagtgtcaacgaatccagtgtcct

SEQ ID NO: 4851 - DNA, 25 bp, Homo sapiens
cagtgtcaacgaatccagtgtcctg

SEQ ID NO: 4852 - DNA, 25 bp, Homo sapiens
agtgtcaacgaatccagtgtcctga

SEQ ID NO: 4853 - DNA, 25 bp, Homo sapiens
gtgtcaacgaatccagtgtcctgaa

SEQ ID NO: 4854 - DNA, 25 bp, Homo sapiens
tgtcaacgaatccagtgtcctgaac

SEQ ID NO: 4855 - DNA, 25 bp, Homo sapiens
gtcaacgaatccagtgtcctgaaca

SEQ ID NO: 4856 - DNA, 25 bp, Homo sapiens
tcaacgaatccagtgtcctgaacac

SEQ ID NO: 4857 - DNA, 25 bp, Homo sapiens
caacgaatccagtgtcctgaacacg

SEQ ID NO: 4858 - DNA, 25 bp, Homo sapiens
aacgaatccagtgtcctgaacacgc

SEQ ID NO: 4859 - DNA, 25 bp, Homo sapiens
acgaatccagtgtcctgaacacgct

SEQ ID NO: 4860 - DNA, 25 bp, Homo sapiens
cgaatccagtgtcctgaacacgctt

SEQ ID NO: 4861 - DNA, 25 bp, Homo sapiens
gaatccagtgtcctgaacacgcttc

SEQ ID NO: 4862 - DNA, 25 bp, Homo sapiens
aatccagtgtcctgaacacgcttct

SEQ ID NO: 4863 - DNA, 25 bp, Homo sapiens
atccagtgtcctgaacacgcttctg

SEQ ID NO: 4864 - DNA, 25 bp, Homo sapiens
tccagtgtcctgaacacgcttctgc

SEQ ID NO: 4865 - DNA, 25 bp, Homo sapiens
ccagtgtcctgaacacgcttctgca

SEQ ID NO: 4866 - DNA, 25 bp, Homo sapiens
cagtgtcctgaacacgcttctgcag

SEQ ID NO: 4867 - DNA, 25 bp, Homo sapiens
agtgtcctgaacacgcttctgcagc

SEQ ID NO: 4868 - DNA, 25 bp, Homo sapiens
gtgtcctgaacacgcttctgcagcg

SEQ ID NO: 4869 - DNA, 25 bp, Homo sapiens
tgtcctgaacacgcttctgcagcgc

SEQ ID NO: 4870 - DNA, 25 bp, Homo sapiens
gtcctgaacacgcttctgcagcgct

SEQ ID NO: 4871 - DNA, 25 bp, Homo sapiens
tcctgaacacgcttctgcagcgcta

SEQ ID NO: 4872 - DNA, 25 bp, Homo sapiens
cctgaacacgcttctgcagcgctac

SEQ ID NO: 4873 - DNA, 25 bp, Homo sapiens
ctgaacacgcttctgcagcgctaca

SEQ ID NO: 4874 - DNA, 25 bp, Homo sapiens
tgaacacgcttctgcagcgctacaa

SEQ ID NO: 4875 - DNA, 25 bp, Homo sapiens
gaacacgcttctgcagcgctacaaa

SEQ ID NO: 4876 - DNA, 25 bp, Homo sapiens
aacacgcttctgcagcgctacaaag

SEQ ID NO: 4877 - DNA, 25 bp, Homo sapiens
acacgcttctgcagcgctacaaagc

SEQ ID NO: 4878 - DNA, 25 bp, Homo sapiens
cacgcttctgcagcgctacaaagct

SEQ ID NO: 4879 - DNA, 25 bp, Homo sapiens
acgcttctgcagcgctacaaagctc

SEQ ID NO: 4880 - DNA, 25 bp, Homo sapiens
cgcttctgcagcgctacaaagctca

SEQ ID NO: 4881 - DNA, 25 bp, Homo sapiens
gcttctgcagcgctacaaagctcag

SEQ ID NO: 4882 - DNA, 25 bp, Homo sapiens
cttctgcagcgctacaaagctcagc

SEQ ID NO: 4883 - DNA, 25 bp, Homo sapiens
ttctgcagcgctacaaagctcagct

SEQ ID NO: 4884 - DNA, 25 bp, Homo sapiens
tctgcagcgctacaaagctcagctg

SEQ ID NO: 4885 - DNA, 25 bp, Homo sapiens
ctgcagcgctacaaagctcagctgc

SEQ ID NO: 4886 - DNA, 25 bp, Homo sapiens
tgcagcgctacaaagctcagctgct

SEQ ID NO: 4887 - DNA, 25 bp, Homo sapiens
gcagcgctacaaagctcagctgctg

SEQ ID NO: 4888 - DNA, 25 bp, Homo sapiens
cagcgctacaaagctcagctgctgc

SEQ ID NO: 4889 - DNA, 25 bp, Homo sapiens
agcgctacaaagctcagctgctgca

SEQ ID NO: 4890 - DNA, 25 bp, Homo sapiens
gcgctacaaagctcagctgctgcac

SEQ ID NO: 4891 - DNA, 25 bp, Homo sapiens
cgctacaaagctcagctgctgcaca

SEQ ID NO: 4892 - DNA, 25 bp, Homo sapiens
gctacaaagctcagctgctgcacac

SEQ ID NO: 4893 - DNA, 25 bp, Homo sapiens
ctacaaagctcagctgctgcacacc

SEQ ID NO: 4894 - DNA, 25 bp, Homo sapiens
tacaaagctcagctgctgcacacct

SEQ ID NO: 4895 - DNA, 25 bp, Homo sapiens
acaaagctcagctgctgcacacctg

SEQ ID NO: 4896 - DNA, 25 bp, Homo sapiens
caaagctcagctgctgcacacctgc

SEQ ID NO: 4897 - DNA, 25 bp, Homo sapiens
aaagctcagctgctgcacacctgca

SEQ ID NO: 4898 - DNA, 25 bp, Homo sapiens
aagctcagctgctgcacacctgcac

SEQ ID NO: 4899 - DNA, 25 bp, Homo sapiens
agctcagctgctgcacacctgcaca

SEQ ID NO: 4900 - DNA, 25 bp, Homo sapiens
gctcagctgctgcacacctgcacag

SEQ ID NO: 4901 - DNA, 25 bp, Homo sapiens
ctcagctgctgcacacctgcacagg

SEQ ID NO: 4902 - DNA, 25 bp, Homo sapiens
tcagctgctgcacacctgcacaggg

SEQ ID NO: 4903 - DNA, 25 bp, Homo sapiens
cagctgctgcacacctgcacagggc

SEQ ID NO: 4904 - DNA, 25 bp, Homo sapiens
agctgctgcacacctgcacagggcc

SEQ ID NO: 4905 - DNA, 25 bp, Homo sapiens
gctgctgcacacctgcacagggcct

SEQ ID NO: 4906 - DNA, 25 bp, Homo sapiens
ctgctgcacacctgcacagggcctg

SEQ ID NO: 4907 - DNA, 25 bp, Homo sapiens
tgctgcacacctgcacagggcctga

SEQ ID NO: 4908 - DNA, 25 bp, Homo sapiens
gctgcacacctgcacagggcctgat

SEQ ID NO: 4909 - DNA, 25 bp, Homo sapiens
ctgcacacctgcacagggcctgatc

SEQ ID NO: 4910 - DNA, 25 bp, Homo sapiens
tgcacacctgcacagggcctgatct

SEQ ID NO: 4911 - DNA, 25 bp, Homo sapiens
gcacacctgcacagggcctgatctg

SEQ ID NO: 4912 - DNA, 25 bp, Homo sapiens
cacacctgcacagggcctgatctga

SEQ ID NO: 4913 - DNA, 25 bp, Homo sapiens
acacctgcacagggcctgatctgat

SEQ ID NO: 4914 - DNA, 25 bp, Homo sapiens
cacctgcacagggcctgatctgatt

SEQ ID NO: 4915 - DNA, 25 bp, Homo sapiens
acctgcacagggcctgatctgattg

SEQ ID NO: 4916 - DNA, 25 bp, Homo sapiens
cctgcacagggcctgatctgattgt

SEQ ID NO: 4917 - DNA, 25 bp, Homo sapiens
ctgcacagggcctgatctgattgtc

SEQ ID NO: 4918 - DNA, 25 bp, Homo sapiens
tgcacagggcctgatctgattgtcc

SEQ ID NO: 4919 - DNA, 25 bp, Homo sapiens
gcacagggcctgatctgattgtcct

SEQ ID NO: 4920 - DNA, 25 bp, Homo sapiens
cacagggcctgatctgattgtcctc

SEQ ID NO: 4921 - DNA, 25 bp, Homo sapiens
acagggcctgatctgattgtcctcc

SEQ ID NO: 4922 - DNA, 25 bp, Homo sapiens
cagggcctgatctgattgtcctcca

SEQ ID NO: 4923 - DNA, 25 bp, Homo sapiens
agggcctgatctgattgtcctccag

SEQ ID NO: 4924 - DNA, 25 bp, Homo sapiens
gggcctgatctgattgtcctccagc

SEQ ID NO: 4925 - DNA, 25 bp, Homo sapiens
ggcctgatctgattgtcctccagcc

SEQ ID NO: 4926 - DNA, 25 bp, Homo sapiens
gcctgatctgattgtcctccagccc

SEQ ID NO: 4927 - DNA, 25 bp, Homo sapiens
cctgatctgattgtcctccagcccc

SEQ ID NO: 4928 - DNA, 25 bp, Homo sapiens
ctgatctgattgtcctccagccccg

SEQ ID NO: 4929 - DNA, 25 bp, Homo sapiens
tgatctgattgtcctccagccccgg

SEQ ID NO: 4930 - DNA, 25 bp, Homo sapiens
gatctgattgtcctccagccccggg

SEQ ID NO: 4931 - DNA, 25 bp, Homo sapiens
atctgattgtcctccagccccgggg

SEQ ID NO: 4932 - DNA, 25 bp, Homo sapiens
tctgattgtcctccagccccggggg

SEQ ID NO: 4933 - DNA, 25 bp, Homo sapiens
ctgattgtcctccagccccgggggc

SEQ ID NO: 4934 - DNA, 25 bp, Homo sapiens
tgattgtcctccagccccgggggcc

SEQ ID NO: 4935 - DNA, 25 bp, Homo sapiens
gattgtcctccagccccgggggccc

SEQ ID NO: 4936 - DNA, 25 bp, Homo sapiens
attgtcctccagccccgggggccct

SEQ ID NO: 4937 - DNA, 25 bp, Homo sapiens
ttgtcctccagccccgggggccctc

SEQ ID NO: 4938 - DNA, 25 bp, Homo sapiens
tgtcctccagccccgggggccctcg

SEQ ID NO: 4939 - DNA, 25 bp, Homo sapiens
gtcctccagccccgggggccctcgg

SEQ ID NO: 4940 - DNA, 25 bp, Homo sapiens
tcctccagccccgggggccctcggt

SEQ ID NO: 4941 - DNA, 25 bp, Homo sapiens
cctccagccccgggggccctcggtg

SEQ ID NO: 4942 - DNA, 25 bp, Homo sapiens
ctccagccccgggggccctcggtgc

SEQ ID NO: 4943 - DNA, 25 bp, Homo sapiens
tccagccccgggggccctcggtgcc

SEQ ID NO: 4944 - DNA, 25 bp, Homo sapiens
ccagccccgggggccctcggtgcct

SEQ ID NO: 4945 - DNA, 25 bp, Homo sapiens
cagccccgggggccctcggtgcctt

SEQ ID NO: 4946 - DNA, 25 bp, Homo sapiens
agccccgggggccctcggtgccttc

SEQ ID NO: 4947 - DNA, 25 bp, Homo sapiens
gccccgggggccctcggtgccttct

SEQ ID NO: 4948 - DNA, 25 bp, Homo sapiens
ccccgggggccctcggtgccttctg

SEQ ID NO: 4949 - DNA, 25 bp, Homo sapiens
cccgggggccctcggtgccttctgc

SEQ ID NO: 4950 - DNA, 25 bp, Homo sapiens
ccgggggccctcggtgccttctgca

SEQ ID NO: 4951 - DNA, 25 bp, Homo sapiens
cgggggccctcggtgccttctgcag

SEQ ID NO: 4952 - DNA, 25 bp, Homo sapiens
gggggccctcggtgccttctgcagg

SEQ ID NO: 4953 - DNA, 25 bp, Homo sapiens
ggggccctcggtgccttctgcaggg

SEQ ID NO: 4954 - DNA, 25 bp, Homo sapiens
gggccctcggtgccttctgcaggga

SEQ ID NO: 4955 - DNA, 25 bp, Homo sapiens
ggccctcggtgccttctgcagggaa

SEQ ID NO: 4956 - DNA, 25 bp, Homo sapiens
gccctcggtgccttctgcagggaag

SEQ ID NO: 4957 - DNA, 25 bp, Homo sapiens
ccctcggtgccttctgcagggaagg

SEQ ID NO: 4958 - DNA, 25 bp, Homo sapiens
cctcggtgccttctgcagggaaggt

SEQ ID NO: 4959 - DNA, 25 bp, Homo sapiens
ctcggtgccttctgcagggaaggtg

SEQ ID NO: 4960 - DNA, 25 bp, Homo sapiens
tcggtgccttctgcagggaaggtgc

SEQ ID NO: 4961 - DNA, 25 bp, Homo sapiens
cggtgccttctgcagggaaggtgcc

SEQ ID NO: 4962 - DNA, 25 bp, Homo sapiens
ggtgccttctgcagggaaggtgccc

SEQ ID NO: 4963 - DNA, 25 bp, Homo sapiens
gtgccttctgcagggaaggtgccca

SEQ ID NO: 4964 - DNA, 25 bp, Homo sapiens
tgccttctgcagggaaggtgcccaa

SEQ ID NO: 4965 - DNA, 25 bp, Homo sapiens
gccttctgcagggaaggtgcccaag

SEQ ID NO: 4966 - DNA, 25 bp, Homo sapiens
ccttctgcagggaaggtgcccaagg

SEQ ID NO: 4967 - DNA, 25 bp, Homo sapiens
cttctgcagggaaggtgcccaaggg

SEQ ID NO: 4968 - DNA, 25 bp, Homo sapiens
ttctgcagggaaggtgcccaagggc

SEQ ID NO: 4969 - DNA, 25 bp, Homo sapiens
tctgcagggaaggtgcccaagggcc

SEQ ID NO: 4970 - DNA, 25 bp, Homo sapiens
ctgcagggaaggtgcccaagggccg

SEQ ID NO: 4971 - DNA, 25 bp, Homo sapiens
tgcagggaaggtgcccaagggccgc

SEQ ID NO: 4972 - DNA, 25 bp, Homo sapiens
gcagggaaggtgcccaagggccgcc

SEQ ID NO: 4973 - DNA, 25 bp, Homo sapiens
cagggaaggtgcccaagggccgccg

SEQ ID NO: 4974 - DNA, 25 bp, Homo sapiens
agggaaggtgcccaagggccgccgg

SEQ ID NO: 4975 - DNA, 25 bp, Homo sapiens
gggaaggtgcccaagggccgccggg

SEQ ID NO: 4976 - DNA, 25 bp, Homo sapiens
ggaaggtgcccaagggccgccggga

SEQ ID NO: 4977 - DNA, 25 bp, Homo sapiens
gaaggtgcccaagggccgccgggat

SEQ ID NO: 4978 - DNA, 25 bp, Homo sapiens
aaggtgcccaagggccgccgggatg

SEQ ID NO: 4979 - DNA, 25 bp, Homo sapiens
aggtgcccaagggccgccgggatgg

SEQ ID NO: 4980 - DNA, 25 bp, Homo sapiens
ggtgcccaagggccgccgggatggc

SEQ ID NO: 4981 - DNA, 25 bp, Homo sapiens
gtgcccaagggccgccgggatggcc

SEQ ID NO: 4982 - DNA, 25 bp, Homo sapiens
tgcccaagggccgccgggatggcct

SEQ ID NO: 4983 - DNA, 25 bp, Homo sapiens
gcccaagggccgccgggatggcctg

SEQ ID NO: 4984 - DNA, 25 bp, Homo sapiens
cccaagggccgccgggatggcctgc

SEQ ID NO: 4985 - DNA, 25 bp, Homo sapiens
ccaagggccgccgggatggcctgcc

SEQ ID NO: 4986 - DNA, 25 bp, Homo sapiens
caagggccgccgggatggcctgcct

SEQ ID NO: 4987 - DNA, 25 bp, Homo sapiens
aagggccgccgggatggcctgcctg

SEQ ID NO: 4988 - DNA, 25 bp, Homo sapiens
agggccgccgggatggcctgcctgc

SEQ ID NO: 4989 - DNA, 25 bp, Homo sapiens
gggccgccgggatggcctgcctgcc

SEQ ID NO: 4990 - DNA, 25 bp, Homo sapiens
ggccgccgggatggcctgcctgccc

SEQ ID NO: 4991 - DNA, 25 bp, Homo sapiens
gccgccgggatggcctgcctgccca

SEQ ID NO: 4992 - DNA, 25 bp, Homo sapiens
ccgccgggatggcctgcctgcccac

SEQ ID NO: 4993 - DNA, 25 bp, Homo sapiens
cgccgggatggcctgcctgcccaca

SEQ ID NO: 4994 - DNA, 25 bp, Homo sapiens
gccgggatggcctgcctgcccacat

SEQ ID NO: 4995 - DNA, 25 bp, Homo sapiens
ccgggatggcctgcctgcccacatt

SEQ ID NO: 4996 - DNA, 25 bp, Homo sapiens
cgggatggcctgcctgcccacattg

SEQ ID NO: 4997 - DNA, 25 bp, Homo sapiens
gggatggcctgcctgcccacattgg

SEQ ID NO: 4998 - DNA, 25 bp, Homo sapiens
ggatggcctgcctgcccacattggc

SEQ ID NO: 4999 - DNA, 25 bp, Homo sapiens
gatggcctgcctgcccacattggct

SEQ ID NO: 5000 - DNA, 25 bp, Homo sapiens
atggcctgcctgcccacattggctc

SEQ ID NO: 5001 - DNA, 25 bp, Homo sapiens
tggcctgcctgcccacattggctcc

SEQ ID NO: 5002 - DNA, 25 bp, Homo sapiens
ggcctgcctgcccacattggctcca

SEQ ID NO: 5003 - DNA, 25 bp, Homo sapiens
gcctgcctgcccacattggctccat

SEQ ID NO: 5004 - DNA, 25 bp, Homo sapiens
cctgcctgcccacattggctccatg

SEQ ID NO: 5005 - DNA, 25 bp, Homo sapiens
ctgcctgcccacattggctccatgg

SEQ ID NO: 5006 - DNA, 25 bp, Homo sapiens
tgcctgcccacattggctccatggc

SEQ ID NO: 5007 - DNA, 25 bp, Homo sapiens
gcctgcccacattggctccatggca

SEQ ID NO: 5008 - DNA, 25 bp, Homo sapiens
cctgcccacattggctccatggcac

SEQ ID NO: 5009 - DNA, 25 bp, Homo sapiens
ctgcccacattggctccatggcaca

SEQ ID NO: 5010 - DNA, 25 bp, Homo sapiens
tgcccacattggctccatggcacag

SEQ ID NO: 5011 - DNA, 25 bp, Homo sapiens
gcccacattggctccatggcacagc

SEQ ID NO: 5012 - DNA, 25 bp, Homo sapiens
cccacattggctccatggcacagcg

SEQ ID NO: 5013 - DNA, 25 bp, Homo sapiens
ccacattggctccatggcacagcgg

SEQ ID NO: 5014 - DNA, 25 bp, Homo sapiens
cacattggctccatggcacagcggg

SEQ ID NO: 5015 - DNA, 25 bp, Homo sapiens
acattggctccatggcacagcgggc

SEQ ID NO: 5016 - DNA, 25 bp, Homo sapiens
cattggctccatggcacagcgggca

SEQ ID NO: 5017 - DNA, 25 bp, Homo sapiens
attggctccatggcacagcgggcat

SEQ ID NO: 5018 - DNA, 25 bp, Homo sapiens
ttggctccatggcacagcgggcata

SEQ ID NO: 5019 - DNA, 25 bp, Homo sapiens
tggctccatggcacagcgggcatac

SEQ ID NO: 5020 - DNA, 25 bp, Homo sapiens
ggctccatggcacagcgggcatact

SEQ ID NO: 5021 - DNA, 25 bp, Homo sapiens
gctccatggcacagcgggcatactg

SEQ ID NO: 5022 - DNA, 25 bp, Homo sapiens
ctccatggcacagcgggcatactgg

SEQ ID NO: 5023 - DNA, 25 bp, Homo sapiens
tccatggcacagcgggcatactggg

SEQ ID NO: 5024 - DNA, 25 bp, Homo sapiens
ccatggcacagcgggcatactgggc

SEQ ID NO: 5025 - DNA, 25 bp, Homo sapiens
catggcacagcgggcatactgggcg

SEQ ID NO: 5026 - DNA, 25 bp, Homo sapiens
atggcacagcgggcatactgggcgc

SEQ ID NO: 5027 - DNA, 25 bp, Homo sapiens
tggcacagcgggcatactgggcgct

SEQ ID NO: 5028 - DNA, 25 bp, Homo sapiens
ggcacagcgggcatactgggcgctg

SEQ ID NO: 5029 - DNA, 25 bp, Homo sapiens
gcacagcgggcatactgggcgctgc

SEQ ID NO: 5030 - DNA, 25 bp, Homo sapiens
cacagcgggcatactgggcgctgct

SEQ ID NO: 5031 - DNA, 25 bp, Homo sapiens
acagcgggcatactgggcgctgctg

SEQ ID NO: 5032 - DNA, 25 bp, Homo sapiens
cagcgggcatactgggcgctgctga

SEQ ID NO: 5033 - DNA, 25 bp, Homo sapiens
agcgggcatactgggcgctgctgaa

SEQ ID NO: 5034 - DNA, 25 bp, Homo sapiens
gcgggcatactgggcgctgctgaac

SEQ ID NO: 5035 - DNA, 25 bp, Homo sapiens
cgggcatactgggcgctgctgaacc

SEQ ID NO: 5036 - DNA, 25 bp, Homo sapiens
gggcatactgggcgctgctgaacca

SEQ ID NO: 5037 - DNA, 25 bp, Homo sapiens
ggcatactgggcgctgctgaaccag

SEQ ID NO: 5038 - DNA, 25 bp, Homo sapiens
gcatactgggcgctgctgaaccagc

SEQ ID NO: 5039 - DNA, 25 bp, Homo sapiens
catactgggcgctgctgaaccagcg

SEQ ID NO: 5040 - DNA, 25 bp, Homo sapiens
atactgggcgctgctgaaccagcgg

SEQ ID NO: 5041 - DNA, 25 bp, Homo sapiens
tactgggcgctgctgaaccagcgga

SEQ ID NO: 5042 - DNA, 25 bp, Homo sapiens
actgggcgctgctgaaccagcggag

SEQ ID NO: 5043 - DNA, 25 bp, Homo sapiens
ctgggcgctgctgaaccagcggaga

SEQ ID NO: 5044 - DNA, 25 bp, Homo sapiens
tgggcgctgctgaaccagcggagag

SEQ ID NO: 5045 - DNA, 25 bp, Homo sapiens
gggcgctgctgaaccagcggagaga

SEQ ID NO: 5046 - DNA, 25 bp, Homo sapiens
ggcgctgctgaaccagcggagagac

SEQ ID NO: 5047 - DNA, 25 bp, Homo sapiens
gcgctgctgaaccagcggagagacc

SEQ ID NO: 5048 - DNA, 25 bp, Homo sapiens
cgctgctgaaccagcggagagacca

SEQ ID NO: 5049 - DNA, 25 bp, Homo sapiens
gctgctgaaccagcggagagaccag

SEQ ID NO: 5050 - DNA, 25 bp, Homo sapiens
ctgctgaaccagcggagagaccaga

SEQ ID NO: 5051 - DNA, 25 bp, Homo sapiens
tgctgaaccagcggagagaccagag

SEQ ID NO: 5052 - DNA, 25 bp, Homo sapiens
gctgaaccagcggagagaccagagc

SEQ ID NO: 5053 - DNA, 25 bp, Homo sapiens
ctgaaccagcggagagaccagagca

SEQ ID NO: 5054 - DNA, 25 bp, Homo sapiens
tgaaccagcggagagaccagagcat

SEQ ID NO: 5055 - DNA, 25 bp, Homo sapiens
gaaccagcggagagaccagagcatt

SEQ ID NO: 5056 - DNA, 25 bp, Homo sapiens
aaccagcggagagaccagagcattg

SEQ ID NO: 5057 - DNA, 25 bp, Homo sapiens
accagcggagagaccagagcattgt

SEQ ID NO: 5058 - DNA, 25 bp, Homo sapiens
ccagcggagagaccagagcattgtg

SEQ ID NO: 5059 - DNA, 25 bp, Homo sapiens
cagcggagagaccagagcattgtgg

SEQ ID NO: 5060 - DNA, 25 bp, Homo sapiens
agcggagagaccagagcattgtggc

SEQ ID NO: 5061 - DNA, 25 bp, Homo sapiens
gcggagagaccagagcattgtggcc

SEQ ID NO: 5062 - DNA, 25 bp, Homo sapiens
cggagagaccagagcattgtggccc

SEQ ID NO: 5063 - DNA, 25 bp, Homo sapiens
ggagagaccagagcattgtggccct

SEQ ID NO: 5064 - DNA, 25 bp, Homo sapiens
gagagaccagagcattgtggccctg

SEQ ID NO: 5065 - DNA, 25 bp, Homo sapiens
agagaccagagcattgtggccctgg

SEQ ID NO: 5066 - DNA, 25 bp, Homo sapiens
gagaccagagcattgtggccctggg

SEQ ID NO: 5067 - DNA, 25 bp, Homo sapiens
agaccagagcattgtggccctgggc

SEQ ID NO: 5068 - DNA, 25 bp, Homo sapiens
gaccagagcattgtggccctgggcc

SEQ ID NO: 5069 - DNA, 25 bp, Homo sapiens
accagagcattgtggccctgggccg

SEQ ID NO: 5070 - DNA, 25 bp, Homo sapiens
ccagagcattgtggccctgggccgg

SEQ ID NO: 5071 - DNA, 25 bp, Homo sapiens
cagagcattgtggccctgggccgga

SEQ ID NO: 5072 - DNA, 25 bp, Homo sapiens
agagcattgtggccctgggccggag

SEQ ID NO: 5073 - DNA, 25 bp, Homo sapiens
gagcattgtggccctgggccggagt

SEQ ID NO: 5074 - DNA, 25 bp, Homo sapiens
agcattgtggccctgggccggagtg

SEQ ID NO: 5075 - DNA, 25 bp, Homo sapiens
gcattgtggccctgggccggagtgg

SEQ ID NO: 5076 - DNA, 25 bp, Homo sapiens
cattgtggccctgggccggagtggc

SEQ ID NO: 5077 - DNA, 25 bp, Homo sapiens
attgtggccctgggccggagtggcg

SEQ ID NO: 5078 - DNA, 25 bp, Homo sapiens
ttgtggccctgggccggagtggcgc

SEQ ID NO: 5079 - DNA, 25 bp, Homo sapiens
tgtggccctgggccggagtggcgct

SEQ ID NO: 5080 - DNA, 25 bp, Homo sapiens
gtggccctgggccggagtggcgctg

SEQ ID NO: 5081 - DNA, 25 bp, Homo sapiens
tggccctgggccggagtggcgctgg

SEQ ID NO: 5082 - DNA, 25 bp, Homo sapiens
ggccctgggccggagtggcgctggg

SEQ ID NO: 5083 - DNA, 25 bp, Homo sapiens
gccctgggccggagtggcgctggga

SEQ ID NO: 5084 - DNA, 25 bp, Homo sapiens
ccctgggccggagtggcgctgggaa

SEQ ID NO: 5085 - DNA, 25 bp, Homo sapiens
cctgggccggagtggcgctgggaag

SEQ ID NO: 5086 - DNA, 25 bp, Homo sapiens
ctgggccggagtggcgctgggaaga

SEQ ID NO: 5087 - DNA, 25 bp, Homo sapiens
tgggccggagtggcgctgggaagac

SEQ ID NO: 5088 - DNA, 25 bp, Homo sapiens
gggccggagtggcgctgggaagacc

SEQ ID NO: 5089 - DNA, 25 bp, Homo sapiens
ggccggagtggcgctgggaagacca

SEQ ID NO: 5090 - DNA, 25 bp, Homo sapiens
gccggagtggcgctgggaagaccac

SEQ ID NO: 5091 - DNA, 25 bp, Homo sapiens
ccggagtggcgctgggaagaccacc

SEQ ID NO: 5092 - DNA, 25 bp, Homo sapiens
cggagtggcgctgggaagaccacct

SEQ ID NO: 5093 - DNA, 25 bp, Homo sapiens
ggagtggcgctgggaagaccacctg

SEQ ID NO: 5094 - DNA, 25 bp, Homo sapiens
gagtggcgctgggaagaccacctgc

SEQ ID NO: 5095 - DNA, 25 bp, Homo sapiens
agtggcgctgggaagaccacctgct

SEQ ID NO: 5096 - DNA, 25 bp, Homo sapiens
gtggcgctgggaagaccacctgctg

SEQ ID NO: 5097 - DNA, 25 bp, Homo sapiens
tggcgctgggaagaccacctgctgt

SEQ ID NO: 5098 - DNA, 25 bp, Homo sapiens
ggcgctgggaagaccacctgctgtg

SEQ ID NO: 5099 - DNA, 25 bp, Homo sapiens
gcgctgggaagaccacctgctgtga

SEQ ID NO: 5100 - DNA, 25 bp, Homo sapiens
cgctgggaagaccacctgctgtgag

SEQ ID NO: 5101 - DNA, 25 bp, Homo sapiens
gctgggaagaccacctgctgtgagc

SEQ ID NO: 5102 - DNA, 25 bp, Homo sapiens
ctgggaagaccacctgctgtgagca

SEQ ID NO: 5103 - DNA, 25 bp, Homo sapiens
tgggaagaccacctgctgtgagcag

SEQ ID NO: 5104 - DNA, 25 bp, Homo sapiens
gggaagaccacctgctgtgagcagg

SEQ ID NO: 5105 - DNA, 25 bp, Homo sapiens
ggaagaccacctgctgtgagcaggt

SEQ ID NO: 5106 - DNA, 25 bp, Homo sapiens
gaagaccacctgctgtgagcaggtc

SEQ ID NO: 5107 - DNA, 25 bp, Homo sapiens
aagaccacctgctgtgagcaggtcc

SEQ ID NO: 5108 - DNA, 25 bp, Homo sapiens
agaccacctgctgtgagcaggtcct

SEQ ID NO: 5109 - DNA, 25 bp, Homo sapiens
gaccacctgctgtgagcaggtcctg

SEQ ID NO: 5110 - DNA, 25 bp, Homo sapiens
accacctgctgtgagcaggtcctgg

SEQ ID NO: 5111 - DNA, 25 bp, Homo sapiens
ccacctgctgtgagcaggtcctgga

SEQ ID NO: 5112 - DNA, 25 bp, Homo sapiens
cacctgctgtgagcaggtcctggaa

SEQ ID NO: 5113 - DNA, 25 bp, Homo sapiens
acctgctgtgagcaggtcctggaac

SEQ ID NO: 5114 - DNA, 25 bp, Homo sapiens
cctgctgtgagcaggtcctggaaca

SEQ ID NO: 5115 - DNA, 25 bp, Homo sapiens
ctgctgtgagcaggtcctggaacac

SEQ ID NO: 5116 - DNA, 25 bp, Homo sapiens
tgctgtgagcaggtcctggaacacc

SEQ ID NO: 5117 - DNA, 25 bp, Homo sapiens
gctgtgagcaggtcctggaacacct

SEQ ID NO: 5118 - DNA, 25 bp, Homo sapiens
ctgtgagcaggtcctggaacacctg

SEQ ID NO: 5119 - DNA, 25 bp, Homo sapiens
tgtgagcaggtcctggaacacctgg

SEQ ID NO: 5120 - DNA, 25 bp, Homo sapiens
gtgagcaggtcctggaacacctggt

SEQ ID NO: 5121 - DNA, 25 bp, Homo sapiens
tgagcaggtcctggaacacctggtg

SEQ ID NO: 5122 - DNA, 25 bp, Homo sapiens
gagcaggtcctggaacacctggtgg

SEQ ID NO: 5123 - DNA, 25 bp, Homo sapiens
agcaggtcctggaacacctggtggg

SEQ ID NO: 5124 - DNA, 25 bp, Homo sapiens
gcaggtcctggaacacctggtgggg

SEQ ID NO: 5125 - DNA, 25 bp, Homo sapiens
caggtcctggaacacctggtgggga

SEQ ID NO: 5126 - DNA, 25 bp, Homo sapiens
aggtcctggaacacctggtggggat

SEQ ID NO: 5127 - DNA, 25 bp, Homo sapiens
ggtcctggaacacctggtggggatg

SEQ ID NO: 5128 - DNA, 25 bp, Homo sapiens
gtcctggaacacctggtggggatgg

SEQ ID NO: 5129 - DNA, 25 bp, Homo sapiens
tcctggaacacctggtggggatggc

SEQ ID NO: 5130 - DNA, 25 bp, Homo sapiens
cctggaacacctggtggggatggca

SEQ ID NO: 5131 - DNA, 25 bp, Homo sapiens
ctggaacacctggtggggatggcag

SEQ ID NO: 5132 - DNA, 25 bp, Homo sapiens
tggaacacctggtggggatggcagg

SEQ ID NO: 5133 - DNA, 25 bp, Homo sapiens
ggaacacctggtggggatggcaggc

SEQ ID NO: 5134 - DNA, 25 bp, Homo sapiens
gaacacctggtggggatggcaggca

SEQ ID NO: 5135 - DNA, 25 bp, Homo sapiens
aacacctggtggggatggcaggcag

SEQ ID NO: 5136 - DNA, 25 bp, Homo sapiens
acacctggtggggatggcaggcagt

SEQ ID NO: 5137 - DNA, 25 bp, Homo sapiens
cacctggtggggatggcaggcagtg

SEQ ID NO: 5138 - DNA, 25 bp, Homo sapiens
acctggtggggatggcaggcagtgt

SEQ ID NO: 5139 - DNA, 25 bp, Homo sapiens
cctggtggggatggcaggcagtgtg

SEQ ID NO: 5140 - DNA, 25 bp, Homo sapiens
ctggtggggatggcaggcagtgtgg

SEQ ID NO: 5141 - DNA, 25 bp, Homo sapiens
tggtggggatggcaggcagtgtgga

SEQ ID NO: 5142 - DNA, 25 bp, Homo sapiens
ggtggggatggcaggcagtgtggat

SEQ ID NO: 5143 - DNA, 25 bp, Homo sapiens
gtggggatggcaggcagtgtggatg

SEQ ID NO: 5144 - DNA, 25 bp, Homo sapiens
tggggatggcaggcagtgtggatgg

SEQ ID NO: 5145 - DNA, 25 bp, Homo sapiens
ggggatggcaggcagtgtggatggc

SEQ ID NO: 5146 - DNA, 25 bp, Homo sapiens
gggatggcaggcagtgtggatggca

SEQ ID NO: 5147 - DNA, 25 bp, Homo sapiens
ggatggcaggcagtgtggatggcag

SEQ ID NO: 5148 - DNA, 25 bp, Homo sapiens
gatggcaggcagtgtggatggcagg

SEQ ID NO: 5149 - DNA, 25 bp, Homo sapiens
atggcaggcagtgtggatggcaggg

SEQ ID NO: 5150 - DNA, 25 bp, Homo sapiens
tggcaggcagtgtggatggcagggt

SEQ ID NO: 5151 - DNA, 25 bp, Homo sapiens
ggcaggcagtgtggatggcagggtc

SEQ ID NO: 5152 - DNA, 25 bp, Homo sapiens
gcaggcagtgtggatggcagggtct

SEQ ID NO: 5153 - DNA, 25 bp, Homo sapiens
caggcagtgtggatggcagggtctc

SEQ ID NO: 5154 - DNA, 25 bp, Homo sapiens
aggcagtgtggatggcagggtctca

SEQ ID NO: 5155 - DNA, 25 bp, Homo sapiens
ggcagtgtggatggcagggtctcag

SEQ ID NO: 5156 - DNA, 25 bp, Homo sapiens
gcagtgtggatggcagggtctcagt

SEQ ID NO: 5157 - DNA, 25 bp, Homo sapiens
cagtgtggatggcagggtctcagtg

SEQ ID NO: 5158 - DNA, 25 bp, Homo sapiens
agtgtggatggcagggtctcagtgg

SEQ ID NO: 5159 - DNA, 25 bp, Homo sapiens
gtgtggatggcagggtctcagtgga

SEQ ID NO: 5160 - DNA, 25 bp, Homo sapiens
tgtggatggcagggtctcagtggag

SEQ ID NO: 5161 - DNA, 25 bp, Homo sapiens
gtggatggcagggtctcagtggaga

SEQ ID NO: 5162 - DNA, 25 bp, Homo sapiens
tggatggcagggtctcagtggagaa

SEQ ID NO: 5163 - DNA, 25 bp, Homo sapiens
ggatggcagggtctcagtggagaag

SEQ ID NO: 5164 - DNA, 25 bp, Homo sapiens
gatggcagggtctcagtggagaaga

SEQ ID NO: 5165 - DNA, 25 bp, Homo sapiens
atggcagggtctcagtggagaagat

SEQ ID NO: 5166 - DNA, 25 bp, Homo sapiens
tggcagggtctcagtggagaagatc

SEQ ID NO: 5167 - DNA, 25 bp, Homo sapiens
ggcagggtctcagtggagaagatcc

SEQ ID NO: 5168 - DNA, 25 bp, Homo sapiens
gcagggtctcagtggagaagatccg

SEQ ID NO: 5169 - DNA, 25 bp, Homo sapiens
cagggtctcagtggagaagatccga

SEQ ID NO: 5170 - DNA, 25 bp, Homo sapiens
agggtctcagtggagaagatccgag

SEQ ID NO: 5171 - DNA, 25 bp, Homo sapiens
gggtctcagtggagaagatccgagc

SEQ ID NO: 5172 - DNA, 25 bp, Homo sapiens
ggtctcagtggagaagatccgagcc

SEQ ID NO: 5173 - DNA, 25 bp, Homo sapiens
gtctcagtggagaagatccgagcca

SEQ ID NO: 5174 - DNA, 25 bp, Homo sapiens
tctcagtggagaagatccgagccac

SEQ ID NO: 5175 - DNA, 25 bp, Homo sapiens
ctcagtggagaagatccgagccacc

SEQ ID NO: 5176 - DNA, 25 bp, Homo sapiens
tcagtggagaagatccgagccacct

SEQ ID NO: 5177 - DNA, 25 bp, Homo sapiens
cagtggagaagatccgagccacctt

SEQ ID NO: 5178 - DNA, 25 bp, Homo sapiens
agtggagaagatccgagccaccttc

SEQ ID NO: 5179 - DNA, 25 bp, Homo sapiens
gtggagaagatccgagccaccttca

SEQ ID NO: 5180 - DNA, 25 bp, Homo sapiens
tggagaagatccgagccaccttcac

SEQ ID NO: 5181 - DNA, 25 bp, Homo sapiens
ggagaagatccgagccaccttcact

SEQ ID NO: 5182 - DNA, 25 bp, Homo sapiens
gagaagatccgagccaccttcactg

SEQ ID NO: 5183 - DNA, 25 bp, Homo sapiens
agaagatccgagccaccttcactgt

SEQ ID NO: 5184 - DNA, 25 bp, Homo sapiens
gaagatccgagccaccttcactgtc

SEQ ID NO: 5185 - DNA, 25 bp, Homo sapiens
aagatccgagccaccttcactgtcc

SEQ ID NO: 5186 - DNA, 25 bp, Homo sapiens
agatccgagccaccttcactgtcct

SEQ ID NO: 5187 - DNA, 25 bp, Homo sapiens
gatccgagccaccttcactgtcctc

SEQ ID NO: 5188 - DNA, 25 bp, Homo sapiens
atccgagccaccttcactgtcctcc

SEQ ID NO: 5189 - DNA, 25 bp, Homo sapiens
tccgagccaccttcactgtcctccg

SEQ ID NO: 5190 - DNA, 25 bp, Homo sapiens
ccgagccaccttcactgtcctccgg

SEQ ID NO: 5191 - DNA, 25 bp, Homo sapiens
cgagccaccttcactgtcctccggg

SEQ ID NO: 5192 - DNA, 25 bp, Homo sapiens
gagccaccttcactgtcctccgggc

SEQ ID NO: 5193 - DNA, 25 bp, Homo sapiens
agccaccttcactgtcctccgggcc

SEQ ID NO: 5194 - DNA, 25 bp, Homo sapiens
gccaccttcactgtcctccgggcct

SEQ ID NO: 5195 - DNA, 25 bp, Homo sapiens
ccaccttcactgtcctccgggcctt

SEQ ID NO: 5196 - DNA, 25 bp, Homo sapiens
caccttcactgtcctccgggccttc

SEQ ID NO: 5197 - DNA, 25 bp, Homo sapiens
accttcactgtcctccgggccttcg

SEQ ID NO: 5198 - DNA, 25 bp, Homo sapiens
ccttcactgtcctccgggccttcgg

SEQ ID NO: 5199 - DNA, 25 bp, Homo sapiens
cttcactgtcctccgggccttcggc

SEQ ID NO: 5200 - DNA, 25 bp, Homo sapiens
ttcactgtcctccgggccttcggct

SEQ ID NO: 5201 - DNA, 25 bp, Homo sapiens
tcactgtcctccgggccttcggctc

SEQ ID NO: 5202 - DNA, 25 bp, Homo sapiens
cactgtcctccgggccttcggctct

SEQ ID NO: 5203 - DNA, 25 bp, Homo sapiens
actgtcctccgggccttcggctctg

SEQ ID NO: 5204 - DNA, 25 bp, Homo sapiens
ctgtcctccgggccttcggctctgt

SEQ ID NO: 5205 - DNA, 25 bp, Homo sapiens
tgtcctccgggccttcggctctgtg

SEQ ID NO: 5206 - DNA, 25 bp, Homo sapiens
gtcctccgggccttcggctctgtgt

SEQ ID NO: 5207 - DNA, 25 bp, Homo sapiens
tcctccgggccttcggctctgtgtc

SEQ ID NO: 5208 - DNA, 25 bp, Homo sapiens
cctccgggccttcggctctgtgtcc

SEQ ID NO: 5209 - DNA, 25 bp, Homo sapiens
ctccgggccttcggctctgtgtcca

SEQ ID NO: 5210 - DNA, 25 bp, Homo sapiens
tccgggccttcggctctgtgtccat

SEQ ID NO: 5211 - DNA, 25 bp, Homo sapiens
ccgggccttcggctctgtgtccatg

SEQ ID NO: 5212 - DNA, 25 bp, Homo sapiens
cgggccttcggctctgtgtccatgg

SEQ ID NO: 5213 - DNA, 25 bp, Homo sapiens
gggccttcggctctgtgtccatggc

SEQ ID NO: 5214 - DNA, 25 bp, Homo sapiens
ggccttcggctctgtgtccatggcc

SEQ ID NO: 5215 - DNA, 25 bp, Homo sapiens
gccttcggctctgtgtccatggccc

SEQ ID NO: 5216 - DNA, 25 bp, Homo sapiens
ccttcggctctgtgtccatggccca

SEQ ID NO: 5217 - DNA, 25 bp, Homo sapiens
cttcggctctgtgtccatggcccac

SEQ ID NO: 5218 - DNA, 25 bp, Homo sapiens
ttcggctctgtgtccatggcccaca

SEQ ID NO: 5219 - DNA, 25 bp, Homo sapiens
tcggctctgtgtccatggcccacag

SEQ ID NO: 5220 - DNA, 25 bp, Homo sapiens
cggctctgtgtccatggcccacagc

SEQ ID NO: 5221 - DNA, 25 bp, Homo sapiens
ggctctgtgtccatggcccacagcc

SEQ ID NO: 5222 - DNA, 25 bp, Homo sapiens
gctctgtgtccatggcccacagccg

SEQ ID NO: 5223 - DNA, 25 bp, Homo sapiens
ctctgtgtccatggcccacagccgc

SEQ ID NO: 5224 - DNA, 25 bp, Homo sapiens
tctgtgtccatggcccacagccgca

SEQ ID NO: 5225 - DNA, 25 bp, Homo sapiens
ctgtgtccatggcccacagccgcag

SEQ ID NO: 5226 - DNA, 25 bp, Homo sapiens
tgtgtccatggcccacagccgcagt

SEQ ID NO: 5227 - DNA, 25 bp, Homo sapiens
gtgtccatggcccacagccgcagtg

SEQ ID NO: 5228 - DNA, 25 bp, Homo sapiens
tgtccatggcccacagccgcagtgc

SEQ ID NO: 5229 - DNA, 25 bp, Homo sapiens
gtccatggcccacagccgcagtgcc

SEQ ID NO: 5230 - DNA, 25 bp, Homo sapiens
tccatggcccacagccgcagtgcca

SEQ ID NO: 5231 - DNA, 25 bp, Homo sapiens
ccatggcccacagccgcagtgccac

SEQ ID NO: 5232 - DNA, 25 bp, Homo sapiens
catggcccacagccgcagtgccacc

SEQ ID NO: 5233 - DNA, 25 bp, Homo sapiens
atggcccacagccgcagtgccaccc

SEQ ID NO: 5234 - DNA, 25 bp, Homo sapiens
tggcccacagccgcagtgccacccg

SEQ ID NO: 5235 - DNA, 25 bp, Homo sapiens
ggcccacagccgcagtgccacccgg

SEQ ID NO: 5236 - DNA, 25 bp, Homo sapiens
gcccacagccgcagtgccacccggt

SEQ ID NO: 5237 - DNA, 25 bp, Homo sapiens
cccacagccgcagtgccacccggtt

SEQ ID NO: 5238 - DNA, 25 bp, Homo sapiens
ccacagccgcagtgccacccggttc

SEQ ID NO: 5239 - DNA, 25 bp, Homo sapiens
cacagccgcagtgccacccggttct

SEQ ID NO: 5240 - DNA, 25 bp, Homo sapiens
acagccgcagtgccacccggttctc

SEQ ID NO: 5241 - DNA, 25 bp, Homo sapiens
cagccgcagtgccacccggttctcc

SEQ ID NO: 5242 - DNA, 25 bp, Homo sapiens
agccgcagtgccacccggttctcca

SEQ ID NO: 5243 - DNA, 25 bp, Homo sapiens
gccgcagtgccacccggttctccat

SEQ ID NO: 5244 - DNA, 25 bp, Homo sapiens
ccgcagtgccacccggttctccatg

SEQ ID NO: 5245 - DNA, 25 bp, Homo sapiens
cgcagtgccacccggttctccatgg

SEQ ID NO: 5246 - DNA, 25 bp, Homo sapiens
gcagtgccacccggttctccatggt

SEQ ID NO: 5247 - DNA, 25 bp, Homo sapiens
cagtgccacccggttctccatggtg

SEQ ID NO: 5248 - DNA, 25 bp, Homo sapiens
agtgccacccggttctccatggtga

SEQ ID NO: 5249 - DNA, 25 bp, Homo sapiens
gtgccacccggttctccatggtgat

SEQ ID NO: 5250 - DNA, 25 bp, Homo sapiens
tgccacccggttctccatggtgatg

SEQ ID NO: 5251 - DNA, 25 bp, Homo sapiens
gccacccggttctccatggtgatgt

SEQ ID NO: 5252 - DNA, 25 bp, Homo sapiens
ccacccggttctccatggtgatgtc

SEQ ID NO: 5253 - DNA, 25 bp, Homo sapiens
cacccggttctccatggtgatgtcg

SEQ ID NO: 5254 - DNA, 25 bp, Homo sapiens
acccggttctccatggtgatgtcgc

SEQ ID NO: 5255 - DNA, 25 bp, Homo sapiens
cccggttctccatggtgatgtcgct

SEQ ID NO: 5256 - DNA, 25 bp, Homo sapiens
ccggttctccatggtgatgtcgctg

SEQ ID NO: 5257 - DNA, 25 bp, Homo sapiens
cggttctccatggtgatgtcgctgg

SEQ ID NO: 5258 - DNA, 25 bp, Homo sapiens
ggttctccatggtgatgtcgctgga

SEQ ID NO: 5259 - DNA, 25 bp, Homo sapiens
gttctccatggtgatgtcgctggac

SEQ ID NO: 5260 - DNA, 25 bp, Homo sapiens
ttctccatggtgatgtcgctggact

SEQ ID NO: 5261 - DNA, 25 bp, Homo sapiens
tctccatggtgatgtcgctggactt

SEQ ID NO: 5262 - DNA, 25 bp, Homo sapiens
ctccatggtgatgtcgctggacttc

SEQ ID NO: 5263 - DNA, 25 bp, Homo sapiens
tccatggtgatgtcgctggacttca

SEQ ID NO: 5264 - DNA, 25 bp, Homo sapiens
ccatggtgatgtcgctggacttcaa

SEQ ID NO: 5265 - DNA, 25 bp, Homo sapiens
catggtgatgtcgctggacttcaac

SEQ ID NO: 5266 - DNA, 25 bp, Homo sapiens
atggtgatgtcgctggacttcaacg

SEQ ID NO: 5267 - DNA, 25 bp, Homo sapiens
tggtgatgtcgctggacttcaacgc

SEQ ID NO: 5268 - DNA, 25 bp, Homo sapiens
ggtgatgtcgctggacttcaacgct

SEQ ID NO: 5269 - DNA, 25 bp, Homo sapiens
gtgatgtcgctggacttcaacgcta

SEQ ID NO: 5270 - DNA, 25 bp, Homo sapiens
tgatgtcgctggacttcaacgctac

SEQ ID NO: 5271 - DNA, 25 bp, Homo sapiens
gatgtcgctggacttcaacgctaca

SEQ ID NO: 5272 - DNA, 25 bp, Homo sapiens
atgtcgctggacttcaacgctacag

SEQ ID NO: 5273 - DNA, 25 bp, Homo sapiens
tgtcgctggacttcaacgctacagg

SEQ ID NO: 5274 - DNA, 25 bp, Homo sapiens
gtcgctggacttcaacgctacaggc

SEQ ID NO: 5275 - DNA, 25 bp, Homo sapiens
tcgctggacttcaacgctacaggcc

SEQ ID NO: 5276 - DNA, 25 bp, Homo sapiens
cgctggacttcaacgctacaggccg

SEQ ID NO: 5277 - DNA, 25 bp, Homo sapiens
gctggacttcaacgctacaggccgc

SEQ ID NO: 5278 - DNA, 25 bp, Homo sapiens
ctggacttcaacgctacaggccgca

SEQ ID NO: 5279 - DNA, 25 bp, Homo sapiens
tggacttcaacgctacaggccgcat

SEQ ID NO: 5280 - DNA, 25 bp, Homo sapiens
ggacttcaacgctacaggccgcatc

SEQ ID NO: 5281 - DNA, 25 bp, Homo sapiens
gacttcaacgctacaggccgcatca

SEQ ID NO: 5282 - DNA, 25 bp, Homo sapiens
acttcaacgctacaggccgcatcac

SEQ ID NO: 5283 - DNA, 25 bp, Homo sapiens
cttcaacgctacaggccgcatcaca

SEQ ID NO: 5284 - DNA, 25 bp, Homo sapiens
ttcaacgctacaggccgcatcacag

SEQ ID NO: 5285 - DNA, 25 bp, Homo sapiens
tcaacgctacaggccgcatcacagc

SEQ ID NO: 5286 - DNA, 25 bp, Homo sapiens
caacgctacaggccgcatcacagct

SEQ ID NO: 5287 - DNA, 25 bp, Homo sapiens
aacgctacaggccgcatcacagctg

SEQ ID NO: 5288 - DNA, 25 bp, Homo sapiens
acgctacaggccgcatcacagctgc

SEQ ID NO: 5289 - DNA, 25 bp, Homo sapiens
cgctacaggccgcatcacagctgct

SEQ ID NO: 5290 - DNA, 25 bp, Homo sapiens
gctacaggccgcatcacagctgctc

SEQ ID NO: 5291 - DNA, 25 bp, Homo sapiens
ctacaggccgcatcacagctgctca

SEQ ID NO: 5292 - DNA, 25 bp, Homo sapiens
tacaggccgcatcacagctgctcag

SEQ ID NO: 5293 - DNA, 25 bp, Homo sapiens
acaggccgcatcacagctgctcagc

SEQ ID NO: 5294 - DNA, 25 bp, Homo sapiens
caggccgcatcacagctgctcagct

SEQ ID NO: 5295 - DNA, 25 bp, Homo sapiens
aggccgcatcacagctgctcagctc

SEQ ID NO: 5296 - DNA, 25 bp, Homo sapiens
ggccgcatcacagctgctcagctcc

SEQ ID NO: 5297 - DNA, 25 bp, Homo sapiens
gccgcatcacagctgctcagctcca

SEQ ID NO: 5298 - DNA, 25 bp, Homo sapiens
ccgcatcacagctgctcagctccag

SEQ ID NO: 5299 - DNA, 25 bp, Homo sapiens
cgcatcacagctgctcagctccaga

SEQ ID NO: 5300 - DNA, 25 bp, Homo sapiens
gcatcacagctgctcagctccagac

SEQ ID NO: 5301 - DNA, 25 bp, Homo sapiens
catcacagctgctcagctccagaca

SEQ ID NO: 5302 - DNA, 25 bp, Homo sapiens
atcacagctgctcagctccagacaa

SEQ ID NO: 5303 - DNA, 25 bp, Homo sapiens
tcacagctgctcagctccagacaat

SEQ ID NO: 5304 - DNA, 25 bp, Homo sapiens
cacagctgctcagctccagacaatg

SEQ ID NO: 5305 - DNA, 25 bp, Homo sapiens
acagctgctcagctccagacaatgc

SEQ ID NO: 5306 - DNA, 25 bp, Homo sapiens
cagctgctcagctccagacaatgct

SEQ ID NO: 5307 - DNA, 25 bp, Homo sapiens
agctgctcagctccagacaatgctt

SEQ ID NO: 5308 - DNA, 25 bp, Homo sapiens
gctgctcagctccagacaatgcttt

SEQ ID NO: 5309 - DNA, 25 bp, Homo sapiens
ctgctcagctccagacaatgctttt

SEQ ID NO: 5310 - DNA, 25 bp, Homo sapiens
tgctcagctccagacaatgcttttg

SEQ ID NO: 5311 - DNA, 25 bp, Homo sapiens
gctcagctccagacaatgcttttgg

SEQ ID NO: 5312 - DNA, 25 bp, Homo sapiens
ctcagctccagacaatgcttttgga

SEQ ID NO: 5313 - DNA, 25 bp, Homo sapiens
tcagctccagacaatgcttttggag

SEQ ID NO: 5314 - DNA, 25 bp, Homo sapiens
cagctccagacaatgcttttggaga

SEQ ID NO: 5315 - DNA, 25 bp, Homo sapiens
agctccagacaatgcttttggagaa

SEQ ID NO: 5316 - DNA, 25 bp, Homo sapiens
gctccagacaatgcttttggagaag

SEQ ID NO: 5317 - DNA, 25 bp, Homo sapiens
ctccagacaatgcttttggagaaga

SEQ ID NO: 5318 - DNA, 25 bp, Homo sapiens
tccagacaatgcttttggagaagag

SEQ ID NO: 5319 - DNA, 25 bp, Homo sapiens
ccagacaatgcttttggagaagagc

SEQ ID NO: 5320 - DNA, 25 bp, Homo sapiens
cagacaatgcttttggagaagagcc

SEQ ID NO: 5321 - DNA, 25 bp, Homo sapiens
agacaatgcttttggagaagagccg

SEQ ID NO: 5322 - DNA, 25 bp, Homo sapiens
gacaatgcttttggagaagagccgc

SEQ ID NO: 5323 - DNA, 25 bp, Homo sapiens
acaatgcttttggagaagagccgcg

SEQ ID NO: 5324 - DNA, 25 bp, Homo sapiens
caatgcttttggagaagagccgcgt

SEQ ID NO: 5325 - DNA, 25 bp, Homo sapiens
aatgcttttggagaagagccgcgtg

SEQ ID NO: 5326 - DNA, 25 bp, Homo sapiens
atgcttttggagaagagccgcgtgg

SEQ ID NO: 5327 - DNA, 25 bp, Homo sapiens
tgcttttggagaagagccgcgtggc

SEQ ID NO: 5328 - DNA, 25 bp, Homo sapiens
gcttttggagaagagccgcgtggca

SEQ ID NO: 5329 - DNA, 25 bp, Homo sapiens
cttttggagaagagccgcgtggcac

SEQ ID NO: 5330 - DNA, 25 bp, Homo sapiens
ttttggagaagagccgcgtggcacg

SEQ ID NO: 5331 - DNA, 25 bp, Homo sapiens
tttggagaagagccgcgtggcacgg

SEQ ID NO: 5332 - DNA, 25 bp, Homo sapiens
ttggagaagagccgcgtggcacggc

SEQ ID NO: 5333 - DNA, 25 bp, Homo sapiens
tggagaagagccgcgtggcacggca

SEQ ID NO: 5334 - DNA, 25 bp, Homo sapiens
ggagaagagccgcgtggcacggcag

SEQ ID NO: 5335 - DNA, 25 bp, Homo sapiens
gagaagagccgcgtggcacggcagc

SEQ ID NO: 5336 - DNA, 25 bp, Homo sapiens
agaagagccgcgtggcacggcagcc

SEQ ID NO: 5337 - DNA, 25 bp, Homo sapiens
gaagagccgcgtggcacggcagccg

SEQ ID NO: 5338 - DNA, 25 bp, Homo sapiens
aagagccgcgtggcacggcagccgg

SEQ ID NO: 5339 - DNA, 25 bp, Homo sapiens
agagccgcgtggcacggcagccgga

SEQ ID NO: 5340 - DNA, 25 bp, Homo sapiens
gagccgcgtggcacggcagccggaa

SEQ ID NO: 5341 - DNA, 25 bp, Homo sapiens
agccgcgtggcacggcagccggaag

SEQ ID NO: 5342 - DNA, 25 bp, Homo sapiens
gccgcgtggcacggcagccggaagg

SEQ ID NO: 5343 - DNA, 25 bp, Homo sapiens
ccgcgtggcacggcagccggaaggg

SEQ ID NO: 5344 - DNA, 25 bp, Homo sapiens
cgcgtggcacggcagccggaagggg

SEQ ID NO: 5345 - DNA, 25 bp, Homo sapiens
gcgtggcacggcagccggaagggga

SEQ ID NO: 5346 - DNA, 25 bp, Homo sapiens
cgtggcacggcagccggaaggggaa

SEQ ID NO: 5347 - DNA, 25 bp, Homo sapiens
gtggcacggcagccggaaggggaaa

SEQ ID NO: 5348 - DNA, 25 bp, Homo sapiens
tggcacggcagccggaaggggaaag

SEQ ID NO: 5349 - DNA, 25 bp, Homo sapiens
ggcacggcagccggaaggggaaagt

SEQ ID NO: 5350 - DNA, 25 bp, Homo sapiens
gcacggcagccggaaggggaaagta

SEQ ID NO: 5351 - DNA, 25 bp, Homo sapiens
cacggcagccggaaggggaaagtaa

SEQ ID NO: 5352 - DNA, 25 bp, Homo sapiens
acggcagccggaaggggaaagtaac

SEQ ID NO: 5353 - DNA, 25 bp, Homo sapiens
cggcagccggaaggggaaagtaact

SEQ ID NO: 5354 - DNA, 25 bp, Homo sapiens
ggcagccggaaggggaaagtaactt

SEQ ID NO: 5355 - DNA, 25 bp, Homo sapiens
gcagccggaaggggaaagtaacttc

SEQ ID NO: 5356 - DNA, 25 bp, Homo sapiens
cagccggaaggggaaagtaacttcc

SEQ ID NO: 5357 - DNA, 25 bp, Homo sapiens
agccggaaggggaaagtaacttcct

SEQ ID NO: 5358 - DNA, 25 bp, Homo sapiens
gccggaaggggaaagtaacttcctg

SEQ ID NO: 5359 - DNA, 25 bp, Homo sapiens
ccggaaggggaaagtaacttcctgg

SEQ ID NO: 5360 - DNA, 25 bp, Homo sapiens
cggaaggggaaagtaacttcctggt

SEQ ID NO: 5361 - DNA, 25 bp, Homo sapiens
ggaaggggaaagtaacttcctggtt

SEQ ID NO: 5362 - DNA, 25 bp, Homo sapiens
gaaggggaaagtaacttcctggttt

SEQ ID NO: 5363 - DNA, 25 bp, Homo sapiens
aaggggaaagtaacttcctggtttt

SEQ ID NO: 5364 - DNA, 25 bp, Homo sapiens
aggggaaagtaacttcctggttttc

SEQ ID NO: 5365 - DNA, 25 bp, Homo sapiens
ggggaaagtaacttcctggttttct

SEQ ID NO: 5366 - DNA, 25 bp, Homo sapiens
gggaaagtaacttcctggttttctc

SEQ ID NO: 5367 - DNA, 25 bp, Homo sapiens
ggaaagtaacttcctggttttctcc

SEQ ID NO: 5368 - DNA, 25 bp, Homo sapiens
gaaagtaacttcctggttttctccc

SEQ ID NO: 5369 - DNA, 25 bp, Homo sapiens
aaagtaacttcctggttttctccca

SEQ ID NO: 5370 - DNA, 25 bp, Homo sapiens
aagtaacttcctggttttctcccag

SEQ ID NO: 5371 - DNA, 25 bp, Homo sapiens
agtaacttcctggttttctcccaga

SEQ ID NO: 5372 - DNA, 25 bp, Homo sapiens
gtaacttcctggttttctcccagat

SEQ ID NO: 5373 - DNA, 25 bp, Homo sapiens
taacttcctggttttctcccagatg

SEQ ID NO: 5374 - DNA, 25 bp, Homo sapiens
aacttcctggttttctcccagatgc

SEQ ID NO: 5375 - DNA, 25 bp, Homo sapiens
acttcctggttttctcccagatgct

SEQ ID NO: 5376 - DNA, 25 bp, Homo sapiens
cttcctggttttctcccagatgctg

SEQ ID NO: 5377 - DNA, 25 bp, Homo sapiens
ttcctggttttctcccagatgctgg

SEQ ID NO: 5378 - DNA, 25 bp, Homo sapiens
tcctggttttctcccagatgctggc

SEQ ID NO: 5379 - DNA, 25 bp, Homo sapiens
cctggttttctcccagatgctggct

SEQ ID NO: 5380 - DNA, 25 bp, Homo sapiens
ctggttttctcccagatgctggctg

SEQ ID NO: 5381 - DNA, 25 bp, Homo sapiens
tggttttctcccagatgctggctgg

SEQ ID NO: 5382 - DNA, 25 bp, Homo sapiens
ggttttctcccagatgctggctgga

SEQ ID NO: 5383 - DNA, 25 bp, Homo sapiens
gttttctcccagatgctggctggat

SEQ ID NO: 5384 - DNA, 25 bp, Homo sapiens
ttttctcccagatgctggctggatt

SEQ ID NO: 5385 - DNA, 25 bp, Homo sapiens
tttctcccagatgctggctggattg

SEQ ID NO: 5386 - DNA, 25 bp, Homo sapiens
ttctcccagatgctggctggattgg

SEQ ID NO: 5387 - DNA, 25 bp, Homo sapiens
tctcccagatgctggctggattgga

SEQ ID NO: 5388 - DNA, 25 bp, Homo sapiens
ctcccagatgctggctggattggac

SEQ ID NO: 5389 - DNA, 25 bp, Homo sapiens
tcccagatgctggctggattggact

SEQ ID NO: 5390 - DNA, 25 bp, Homo sapiens
cccagatgctggctggattggactt

SEQ ID NO: 5391 - DNA, 25 bp, Homo sapiens
ccagatgctggctggattggacttg

SEQ ID NO: 5392 - DNA, 25 bp, Homo sapiens
cagatgctggctggattggacttgg

SEQ ID NO: 5393 - DNA, 25 bp, Homo sapiens
agatgctggctggattggacttgga

SEQ ID NO: 5394 - DNA, 25 bp, Homo sapiens
gatgctggctggattggacttggat

SEQ ID NO: 5395 - DNA, 25 bp, Homo sapiens
atgctggctggattggacttggatc

SEQ ID NO: 5396 - DNA, 25 bp, Homo sapiens
tgctggctggattggacttggatct

SEQ ID NO: 5397 - DNA, 25 bp, Homo sapiens
gctggctggattggacttggatctc

SEQ ID NO: 5398 - DNA, 25 bp, Homo sapiens
ctggctggattggacttggatctca

SEQ ID NO: 5399 - DNA, 25 bp, Homo sapiens
tggctggattggacttggatctcag

SEQ ID NO: 5400 - DNA, 25 bp, Homo sapiens
ggctggattggacttggatctcagg

SEQ ID NO: 5401 - DNA, 25 bp, Homo sapiens
gctggattggacttggatctcagga

SEQ ID NO: 5402 - DNA, 25 bp, Homo sapiens
ctggattggacttggatctcaggac

SEQ ID NO: 5403 - DNA, 25 bp, Homo sapiens
tggattggacttggatctcaggacg

SEQ ID NO: 5404 - DNA, 25 bp, Homo sapiens
ggattggacttggatctcaggacgg

SEQ ID NO: 5405 - DNA, 25 bp, Homo sapiens
gattggacttggatctcaggacgga

SEQ ID NO: 5406 - DNA, 25 bp, Homo sapiens
attggacttggatctcaggacggag

SEQ ID NO: 5407 - DNA, 25 bp, Homo sapiens
ttggacttggatctcaggacggagc

SEQ ID NO: 5408 - DNA, 25 bp, Homo sapiens
tggacttggatctcaggacggagct

SEQ ID NO: 5409 - DNA, 25 bp, Homo sapiens
ggacttggatctcaggacggagctg

SEQ ID NO: 5410 - DNA, 25 bp, Homo sapiens
gacttggatctcaggacggagctga

SEQ ID NO: 5411 - DNA, 25 bp, Homo sapiens
acttggatctcaggacggagctgaa

SEQ ID NO: 5412 - DNA, 25 bp, Homo sapiens
cttggatctcaggacggagctgaac

SEQ ID NO: 5413 - DNA, 25 bp, Homo sapiens
ttggatctcaggacggagctgaacc

SEQ ID NO: 5414 - DNA, 25 bp, Homo sapiens
tggatctcaggacggagctgaacct

SEQ ID NO: 5415 - DNA, 25 bp, Homo sapiens
ggatctcaggacggagctgaacctg

SEQ ID NO: 5416 - DNA, 25 bp, Homo sapiens
gatctcaggacggagctgaacctgc

SEQ ID NO: 5417 - DNA, 25 bp, Homo sapiens
atctcaggacggagctgaacctgca

SEQ ID NO: 5418 - DNA, 25 bp, Homo sapiens
tctcaggacggagctgaacctgcac

SEQ ID NO: 5419 - DNA, 25 bp, Homo sapiens
ctcaggacggagctgaacctgcacc

SEQ ID NO: 5420 - DNA, 25 bp, Homo sapiens
tcaggacggagctgaacctgcacca

SEQ ID NO: 5421 - DNA, 25 bp, Homo sapiens
caggacggagctgaacctgcaccag

SEQ ID NO: 5422 - DNA, 25 bp, Homo sapiens
aggacggagctgaacctgcaccaga

SEQ ID NO: 5423 - DNA, 25 bp, Homo sapiens
ggacggagctgaacctgcaccagat

SEQ ID NO: 5424 - DNA, 25 bp, Homo sapiens
gacggagctgaacctgcaccagatg

SEQ ID NO: 5425 - DNA, 25 bp, Homo sapiens
acggagctgaacctgcaccagatgg

SEQ ID NO: 5426 - DNA, 25 bp, Homo sapiens
cggagctgaacctgcaccagatggc

SEQ ID NO: 5427 - DNA, 25 bp, Homo sapiens
ggagctgaacctgcaccagatggca

SEQ ID NO: 5428 - DNA, 25 bp, Homo sapiens
gagctgaacctgcaccagatggcag

SEQ ID NO: 5429 - DNA, 25 bp, Homo sapiens
agctgaacctgcaccagatggcaga

SEQ ID NO: 5430 - DNA, 25 bp, Homo sapiens
gctgaacctgcaccagatggcagat

SEQ ID NO: 5431 - DNA, 25 bp, Homo sapiens
ctgaacctgcaccagatggcagata

SEQ ID NO: 5432 - DNA, 25 bp, Homo sapiens
tgaacctgcaccagatggcagatag

SEQ ID NO: 5433 - DNA, 25 bp, Homo sapiens
gaacctgcaccagatggcagatagc

SEQ ID NO: 5434 - DNA, 25 bp, Homo sapiens
aacctgcaccagatggcagatagca

SEQ ID NO: 5435 - DNA, 25 bp, Homo sapiens
acctgcaccagatggcagatagcag

SEQ ID NO: 5436 - DNA, 25 bp, Homo sapiens
cctgcaccagatggcagatagcagc

SEQ ID NO: 5437 - DNA, 25 bp, Homo sapiens
ctgcaccagatggcagatagcagct

SEQ ID NO: 5438 - DNA, 25 bp, Homo sapiens
tgcaccagatggcagatagcagctc

SEQ ID NO: 5439 - DNA, 25 bp, Homo sapiens
gcaccagatggcagatagcagctcc

SEQ ID NO: 5440 - DNA, 25 bp, Homo sapiens
caccagatggcagatagcagctcct

SEQ ID NO: 5441 - DNA, 25 bp, Homo sapiens
accagatggcagatagcagctcctt

SEQ ID NO: 5442 - DNA, 25 bp, Homo sapiens
ccagatggcagatagcagctccttt

SEQ ID NO: 5443 - DNA, 25 bp, Homo sapiens
cagatggcagatagcagctcctttg

SEQ ID NO: 5444 - DNA, 25 bp, Homo sapiens
agatggcagatagcagctcctttgg

SEQ ID NO: 5445 - DNA, 25 bp, Homo sapiens
gatggcagatagcagctcctttggc

SEQ ID NO: 5446 - DNA, 25 bp, Homo sapiens
atggcagatagcagctcctttggca

SEQ ID NO: 5447 - DNA, 25 bp, Homo sapiens
tggcagatagcagctcctttggcat

SEQ ID NO: 5448 - DNA, 25 bp, Homo sapiens
ggcagatagcagctcctttggcatg

SEQ ID NO: 5449 - DNA, 25 bp, Homo sapiens
gcagatagcagctcctttggcatgg

SEQ ID NO: 5450 - DNA, 25 bp, Homo sapiens
cagatagcagctcctttggcatggg

SEQ ID NO: 5451 - DNA, 25 bp, Homo sapiens
agatagcagctcctttggcatgggc

SEQ ID NO: 5452 - DNA, 25 bp, Homo sapiens
gatagcagctcctttggcatgggcg

SEQ ID NO: 5453 - DNA, 25 bp, Homo sapiens
atagcagctcctttggcatgggcgt

SEQ ID NO: 5454 - DNA, 25 bp, Homo sapiens
tagcagctcctttggcatgggcgtg

SEQ ID NO: 5455 - DNA, 25 bp, Homo sapiens
agcagctcctttggcatgggcgtgt

SEQ ID NO: 5456 - DNA, 25 bp, Homo sapiens
gcagctcctttggcatgggcgtgtg

SEQ ID NO: 5457 - DNA, 25 bp, Homo sapiens
cagctcctttggcatgggcgtgtgg

SEQ ID NO: 5458 - DNA, 25 bp, Homo sapiens
agctcctttggcatgggcgtgtggt

SEQ ID NO: 5459 - DNA, 25 bp, Homo sapiens
gctcctttggcatgggcgtgtggtc

SEQ ID NO: 5460 - DNA, 25 bp, Homo sapiens
ctcctttggcatgggcgtgtggtcc

SEQ ID NO: 5461 - DNA, 25 bp, Homo sapiens
tcctttggcatgggcgtgtggtcca

SEQ ID NO: 5462 - DNA, 25 bp, Homo sapiens
cctttggcatgggcgtgtggtccaa

SEQ ID NO: 5463 - DNA, 25 bp, Homo sapiens
ctttggcatgggcgtgtggtccaag

SEQ ID NO: 5464 - DNA, 25 bp, Homo sapiens
tttggcatgggcgtgtggtccaagc

SEQ ID NO: 5465 - DNA, 25 bp, Homo sapiens
ttggcatgggcgtgtggtccaagcc

SEQ ID NO: 5466 - DNA, 25 bp, Homo sapiens
tggcatgggcgtgtggtccaagcct

SEQ ID NO: 5467 - DNA, 25 bp, Homo sapiens
ggcatgggcgtgtggtccaagcctg

SEQ ID NO: 5468 - DNA, 25 bp, Homo sapiens
gcatgggcgtgtggtccaagcctga

SEQ ID NO: 5469 - DNA, 25 bp, Homo sapiens
catgggcgtgtggtccaagcctgaa

SEQ ID NO: 5470 - DNA, 25 bp, Homo sapiens
atgggcgtgtggtccaagcctgaag

SEQ ID NO: 5471 - DNA, 25 bp, Homo sapiens
tgggcgtgtggtccaagcctgaaga

SEQ ID NO: 5472 - DNA, 25 bp, Homo sapiens
gggcgtgtggtccaagcctgaagat

SEQ ID NO: 5473 - DNA, 25 bp, Homo sapiens
ggcgtgtggtccaagcctgaagata

SEQ ID NO: 5474 - DNA, 25 bp, Homo sapiens
gcgtgtggtccaagcctgaagataa

SEQ ID NO: 5475 - DNA, 25 bp, Homo sapiens
cgtgtggtccaagcctgaagataaa

SEQ ID NO: 5476 - DNA, 25 bp, Homo sapiens
gtgtggtccaagcctgaagataaac

SEQ ID NO: 5477 - DNA, 25 bp, Homo sapiens
tgtggtccaagcctgaagataaaca

SEQ ID NO: 5478 - DNA, 25 bp, Homo sapiens
gtggtccaagcctgaagataaacag

SEQ ID NO: 5479 - DNA, 25 bp, Homo sapiens
tggtccaagcctgaagataaacaga

SEQ ID NO: 5480 - DNA, 25 bp, Homo sapiens
ggtccaagcctgaagataaacagaa

SEQ ID NO: 5481 - DNA, 25 bp, Homo sapiens
gtccaagcctgaagataaacagaag

SEQ ID NO: 5482 - DNA, 25 bp, Homo sapiens
tccaagcctgaagataaacagaagg

SEQ ID NO: 5483 - DNA, 25 bp, Homo sapiens
ccaagcctgaagataaacagaaggc

SEQ ID NO: 5484 - DNA, 25 bp, Homo sapiens
caagcctgaagataaacagaaggcg

SEQ ID NO: 5485 - DNA, 25 bp, Homo sapiens
aagcctgaagataaacagaaggcgg

SEQ ID NO: 5486 - DNA, 25 bp, Homo sapiens
agcctgaagataaacagaaggcggc

SEQ ID NO: 5487 - DNA, 25 bp, Homo sapiens
gcctgaagataaacagaaggcggca

SEQ ID NO: 5488 - DNA, 25 bp, Homo sapiens
cctgaagataaacagaaggcggcag

SEQ ID NO: 5489 - DNA, 25 bp, Homo sapiens
ctgaagataaacagaaggcggcagc

SEQ ID NO: 5490 - DNA, 25 bp, Homo sapiens
tgaagataaacagaaggcggcagct

SEQ ID NO: 5491 - DNA, 25 bp, Homo sapiens
gaagataaacagaaggcggcagctg

SEQ ID NO: 5492 - DNA, 25 bp, Homo sapiens
aagataaacagaaggcggcagctgc

SEQ ID NO: 5493 - DNA, 25 bp, Homo sapiens
agataaacagaaggcggcagctgcc

SEQ ID NO: 5494 - DNA, 25 bp, Homo sapiens
gataaacagaaggcggcagctgcct

SEQ ID NO: 5495 - DNA, 25 bp, Homo sapiens
ataaacagaaggcggcagctgcctt

SEQ ID NO: 5496 - DNA, 25 bp, Homo sapiens
taaacagaaggcggcagctgccttt

SEQ ID NO: 5497 - DNA, 25 bp, Homo sapiens
aaacagaaggcggcagctgcctttg

SEQ ID NO: 5498 - DNA, 25 bp, Homo sapiens
aacagaaggcggcagctgcctttgc

SEQ ID NO: 5499 - DNA, 25 bp, Homo sapiens
acagaaggcggcagctgcctttgcc

SEQ ID NO: 5500 - DNA, 25 bp, Homo sapiens
cagaaggcggcagctgcctttgccc

SEQ ID NO: 5501 - DNA, 25 bp, Homo sapiens
agaaggcggcagctgcctttgccca

SEQ ID NO: 5502 - DNA, 25 bp, Homo sapiens
gaaggcggcagctgcctttgcccag

SEQ ID NO: 5503 - DNA, 25 bp, Homo sapiens
aaggcggcagctgcctttgcccagc

SEQ ID NO: 5504 - DNA, 25 bp, Homo sapiens
aggcggcagctgcctttgcccagct

SEQ ID NO: 5505 - DNA, 25 bp, Homo sapiens
ggcggcagctgcctttgcccagctc

SEQ ID NO: 5506 - DNA, 25 bp, Homo sapiens
gcggcagctgcctttgcccagctcc

SEQ ID NO: 5507 - DNA, 25 bp, Homo sapiens
cggcagctgcctttgcccagctcca

SEQ ID NO: 5508 - DNA, 25 bp, Homo sapiens
ggcagctgcctttgcccagctccag

SEQ ID NO: 5509 - DNA, 25 bp, Homo sapiens
gcagctgcctttgcccagctccagg

SEQ ID NO: 5510 - DNA, 25 bp, Homo sapiens
cagctgcctttgcccagctccaggg

SEQ ID NO: 5511 - DNA, 25 bp, Homo sapiens
agctgcctttgcccagctccagggt

SEQ ID NO: 5512 - DNA, 25 bp, Homo sapiens
gctgcctttgcccagctccagggtg

SEQ ID NO: 5513 - DNA, 25 bp, Homo sapiens
ctgcctttgcccagctccagggtgc

SEQ ID NO: 5514 - DNA, 25 bp, Homo sapiens
tgcctttgcccagctccagggtgcc

SEQ ID NO: 5515 - DNA, 25 bp, Homo sapiens
gcctttgcccagctccagggtgcca

SEQ ID NO: 5516 - DNA, 25 bp, Homo sapiens
cctttgcccagctccagggtgccat

SEQ ID NO: 5517 - DNA, 25 bp, Homo sapiens
ctttgcccagctccagggtgccatg

SEQ ID NO: 5518 - DNA, 25 bp, Homo sapiens
tttgcccagctccagggtgccatgg

SEQ ID NO: 5519 - DNA, 25 bp, Homo sapiens
ttgcccagctccagggtgccatgga

SEQ ID NO: 5520 - DNA, 25 bp, Homo sapiens
tgcccagctccagggtgccatggag

SEQ ID NO: 5521 - DNA, 25 bp, Homo sapiens
gcccagctccagggtgccatggaga

SEQ ID NO: 5522 - DNA, 25 bp, Homo sapiens
cccagctccagggtgccatggagat

SEQ ID NO: 5523 - DNA, 25 bp, Homo sapiens
ccagctccagggtgccatggagatg

SEQ ID NO: 5524 - DNA, 25 bp, Homo sapiens
cagctccagggtgccatggagatgc

SEQ ID NO: 5525 - DNA, 25 bp, Homo sapiens
agctccagggtgccatggagatgct

SEQ ID NO: 5526 - DNA, 25 bp, Homo sapiens
gctccagggtgccatggagatgctg

SEQ ID NO: 5527 - DNA, 25 bp, Homo sapiens
ctccagggtgccatggagatgctgg

SEQ ID NO: 5528 - DNA, 25 bp, Homo sapiens
tccagggtgccatggagatgctggg

SEQ ID NO: 5529 - DNA, 25 bp, Homo sapiens
ccagggtgccatggagatgctgggc

SEQ ID NO: 5530 - DNA, 25 bp, Homo sapiens
cagggtgccatggagatgctgggca

SEQ ID NO: 5531 - DNA, 25 bp, Homo sapiens
agggtgccatggagatgctgggcat

SEQ ID NO: 5532 - DNA, 25 bp, Homo sapiens
gggtgccatggagatgctgggcatc

SEQ ID NO: 5533 - DNA, 25 bp, Homo sapiens
ggtgccatggagatgctgggcatct

SEQ ID NO: 5534 - DNA, 25 bp, Homo sapiens
gtgccatggagatgctgggcatctc

SEQ ID NO: 5535 - DNA, 25 bp, Homo sapiens
tgccatggagatgctgggcatctca

SEQ ID NO: 5536 - DNA, 25 bp, Homo sapiens
gccatggagatgctgggcatctcag

SEQ ID NO: 5537 - DNA, 25 bp, Homo sapiens
ccatggagatgctgggcatctcaga

SEQ ID NO: 5538 - DNA, 25 bp, Homo sapiens
catggagatgctgggcatctcagag

SEQ ID NO: 5539 - DNA, 25 bp, Homo sapiens
atggagatgctgggcatctcagaga

SEQ ID NO: 5540 - DNA, 25 bp, Homo sapiens
tggagatgctgggcatctcagagag

SEQ ID NO: 5541 - DNA, 25 bp, Homo sapiens
ggagatgctgggcatctcagagagc

SEQ ID NO: 5542 - DNA, 25 bp, Homo sapiens
gagatgctgggcatctcagagagcg

SEQ ID NO: 5543 - DNA, 25 bp, Homo sapiens
agatgctgggcatctcagagagcga

SEQ ID NO: 5544 - DNA, 25 bp, Homo sapiens
gatgctgggcatctcagagagcgag

SEQ ID NO: 5545 - DNA, 25 bp, Homo sapiens
atgctgggcatctcagagagcgagc

SEQ ID NO: 5546 - DNA, 25 bp, Homo sapiens
tgctgggcatctcagagagcgagca

SEQ ID NO: 5547 - DNA, 25 bp, Homo sapiens
gctgggcatctcagagagcgagcag

SEQ ID NO: 5548 - DNA, 25 bp, Homo sapiens
ctgggcatctcagagagcgagcagc

SEQ ID NO: 5549 - DNA, 25 bp, Homo sapiens
tgggcatctcagagagcgagcagcg

SEQ ID NO: 5550 - DNA, 25 bp, Homo sapiens
gggcatctcagagagcgagcagcgg

SEQ ID NO: 5551 - DNA, 25 bp, Homo sapiens
ggcatctcagagagcgagcagcggg

SEQ ID NO: 5552 - DNA, 25 bp, Homo sapiens
gcatctcagagagcgagcagcgggc

SEQ ID NO: 5553 - DNA, 25 bp, Homo sapiens
catctcagagagcgagcagcgggct

SEQ ID NO: 5554 - DNA, 25 bp, Homo sapiens
atctcagagagcgagcagcgggctg

SEQ ID NO: 5555 - DNA, 25 bp, Homo sapiens
tctcagagagcgagcagcgggctgt

SEQ ID NO: 5556 - DNA, 25 bp, Homo sapiens
ctcagagagcgagcagcgggctgtt

SEQ ID NO: 5557 - DNA, 25 bp, Homo sapiens
tcagagagcgagcagcgggctgttt

SEQ ID NO: 5558 - DNA, 25 bp, Homo sapiens
cagagagcgagcagcgggctgtttg

SEQ ID NO: 5559 - DNA, 25 bp, Homo sapiens
agagagcgagcagcgggctgtttgg

SEQ ID NO: 5560 - DNA, 25 bp, Homo sapiens
gagagcgagcagcgggctgtttggc

SEQ ID NO: 5561 - DNA, 25 bp, Homo sapiens
agagcgagcagcgggctgtttggcg

SEQ ID NO: 5562 - DNA, 25 bp, Homo sapiens
gagcgagcagcgggctgtttggcgg

SEQ ID NO: 5563 - DNA, 25 bp, Homo sapiens
agcgagcagcgggctgtttggcggg

SEQ ID NO: 5564 - DNA, 25 bp, Homo sapiens
gcgagcagcgggctgtttggcgggt

SEQ ID NO: 5565 - DNA, 25 bp, Homo sapiens
cgagcagcgggctgtttggcgggtc

SEQ ID NO: 5566 - DNA, 25 bp, Homo sapiens
gagcagcgggctgtttggcgggtcc

SEQ ID NO: 5567 - DNA, 25 bp, Homo sapiens
agcagcgggctgtttggcgggtcct

SEQ ID NO: 5568 - DNA, 25 bp, Homo sapiens
gcagcgggctgtttggcgggtcctg

SEQ ID NO: 5569 - DNA, 25 bp, Homo sapiens
cagcgggctgtttggcgggtcctgg

SEQ ID NO: 5570 - DNA, 25 bp, Homo sapiens
agcgggctgtttggcgggtcctggc

SEQ ID NO: 5571 - DNA, 25 bp, Homo sapiens
gcgggctgtttggcgggtcctggca

SEQ ID NO: 5572 - DNA, 25 bp, Homo sapiens
cgggctgtttggcgggtcctggcag

SEQ ID NO: 5573 - DNA, 25 bp, Homo sapiens
gggctgtttggcgggtcctggcagc

SEQ ID NO: 5574 - DNA, 25 bp, Homo sapiens
ggctgtttggcgggtcctggcagcc

SEQ ID NO: 5575 - DNA, 25 bp, Homo sapiens
gctgtttggcgggtcctggcagcca

SEQ ID NO: 5576 - DNA, 25 bp, Homo sapiens
ctgtttggcgggtcctggcagccat

SEQ ID NO: 5577 - DNA, 25 bp, Homo sapiens
tgtttggcgggtcctggcagccatc

SEQ ID NO: 5578 - DNA, 25 bp, Homo sapiens
gtttggcgggtcctggcagccatct

SEQ ID NO: 5579 - DNA, 25 bp, Homo sapiens
tttggcgggtcctggcagccatcta

SEQ ID NO: 5580 - DNA, 25 bp, Homo sapiens
ttggcgggtcctggcagccatctac

SEQ ID NO: 5581 - DNA, 25 bp, Homo sapiens
tggcgggtcctggcagccatctacc

SEQ ID NO: 5582 - DNA, 25 bp, Homo sapiens
ggcgggtcctggcagccatctacca

SEQ ID NO: 5583 - DNA, 25 bp, Homo sapiens
gcgggtcctggcagccatctaccac

SEQ ID NO: 5584 - DNA, 25 bp, Homo sapiens
cgggtcctggcagccatctaccacc

SEQ ID NO: 5585 - DNA, 25 bp, Homo sapiens
gggtcctggcagccatctaccacct

SEQ ID NO: 5586 - DNA, 25 bp, Homo sapiens
ggtcctggcagccatctaccacctg

SEQ ID NO: 5587 - DNA, 25 bp, Homo sapiens
gtcctggcagccatctaccacctgg

SEQ ID NO: 5588 - DNA, 25 bp, Homo sapiens
tcctggcagccatctaccacctggg

SEQ ID NO: 5589 - DNA, 25 bp, Homo sapiens
cctggcagccatctaccacctgggc

SEQ ID NO: 5590 - DNA, 25 bp, Homo sapiens
ctggcagccatctaccacctgggcg

SEQ ID NO: 5591 - DNA, 25 bp, Homo sapiens
tggcagccatctaccacctgggcgc

SEQ ID NO: 5592 - DNA, 25 bp, Homo sapiens
ggcagccatctaccacctgggcgcg

SEQ ID NO: 5593 - DNA, 25 bp, Homo sapiens
gcagccatctaccacctgggcgcgg

SEQ ID NO: 5594 - DNA, 25 bp, Homo sapiens
cagccatctaccacctgggcgcggc

SEQ ID NO: 5595 - DNA, 25 bp, Homo sapiens
agccatctaccacctgggcgcggcg

SEQ ID NO: 5596 - DNA, 25 bp, Homo sapiens
gccatctaccacctgggcgcggcgg

SEQ ID NO: 5597 - DNA, 25 bp, Homo sapiens
ccatctaccacctgggcgcggcggg

SEQ ID NO: 5598 - DNA, 25 bp, Homo sapiens
catctaccacctgggcgcggcgggg

SEQ ID NO: 5599 - DNA, 25 bp, Homo sapiens
atctaccacctgggcgcggcggggg

SEQ ID NO: 5600 - DNA, 25 bp, Homo sapiens
tctaccacctgggcgcggcgggggc

SEQ ID NO: 5601 - DNA, 25 bp, Homo sapiens
ctaccacctgggcgcggcgggggcc

SEQ ID NO: 5602 - DNA, 25 bp, Homo sapiens
taccacctgggcgcggcgggggcct

SEQ ID NO: 5603 - DNA, 25 bp, Homo sapiens
accacctgggcgcggcgggggcctg

SEQ ID NO: 5604 - DNA, 25 bp, Homo sapiens
ccacctgggcgcggcgggggcctgc

SEQ ID NO: 5605 - DNA, 25 bp, Homo sapiens
cacctgggcgcggcgggggcctgca

SEQ ID NO: 5606 - DNA, 25 bp, Homo sapiens
acctgggcgcggcgggggcctgcaa

SEQ ID NO: 5607 - DNA, 25 bp, Homo sapiens
cctgggcgcggcgggggcctgcaaa

SEQ ID NO: 5608 - DNA, 25 bp, Homo sapiens
ctgggcgcggcgggggcctgcaaag

SEQ ID NO: 5609 - DNA, 25 bp, Homo sapiens
tgggcgcggcgggggcctgcaaagt

SEQ ID NO: 5610 - DNA, 25 bp, Homo sapiens
gggcgcggcgggggcctgcaaagtg

SEQ ID NO: 5611 - DNA, 25 bp, Homo sapiens
ggcgcggcgggggcctgcaaagtgg

SEQ ID NO: 5612 - DNA, 25 bp, Homo sapiens
gcgcggcgggggcctgcaaagtggg

SEQ ID NO: 5613 - DNA, 25 bp, Homo sapiens
cgcggcgggggcctgcaaagtgggt

SEQ ID NO: 5614 - DNA, 25 bp, Homo sapiens
gcggcgggggcctgcaaagtgggtc

SEQ ID NO: 5615 - DNA, 25 bp, Homo sapiens
cggcgggggcctgcaaagtgggtcg

SEQ ID NO: 5616 - DNA, 25 bp, Homo sapiens
ggcgggggcctgcaaagtgggtcgg

SEQ ID NO: 5617 - DNA, 25 bp, Homo sapiens
gcgggggcctgcaaagtgggtcgga

SEQ ID NO: 5618 - DNA, 25 bp, Homo sapiens
cgggggcctgcaaagtgggtcggaa

SEQ ID NO: 5619 - DNA, 25 bp, Homo sapiens
gggggcctgcaaagtgggtcggaag

SEQ ID NO: 5620 - DNA, 25 bp, Homo sapiens
ggggcctgcaaagtgggtcggaagc

SEQ ID NO: 5621 - DNA, 25 bp, Homo sapiens
gggcctgcaaagtgggtcggaagca

SEQ ID NO: 5622 - DNA, 25 bp, Homo sapiens
ggcctgcaaagtgggtcggaagcag

SEQ ID NO: 5623 - DNA, 25 bp, Homo sapiens
gcctgcaaagtgggtcggaagcagt

SEQ ID NO: 5624 - DNA, 25 bp, Homo sapiens
cctgcaaagtgggtcggaagcagtt

SEQ ID NO: 5625 - DNA, 25 bp, Homo sapiens
ctgcaaagtgggtcggaagcagttc

SEQ ID NO: 5626 - DNA, 25 bp, Homo sapiens
tgcaaagtgggtcggaagcagttca

SEQ ID NO: 5627 - DNA, 25 bp, Homo sapiens
gcaaagtgggtcggaagcagttcat

SEQ ID NO: 5628 - DNA, 25 bp, Homo sapiens
caaagtgggtcggaagcagttcatg

SEQ ID NO: 5629 - DNA, 25 bp, Homo sapiens
aaagtgggtcggaagcagttcatga

SEQ ID NO: 5630 - DNA, 25 bp, Homo sapiens
aagtgggtcggaagcagttcatgag

SEQ ID NO: 5631 - DNA, 25 bp, Homo sapiens
agtgggtcggaagcagttcatgagg

SEQ ID NO: 5632 - DNA, 25 bp, Homo sapiens
gtgggtcggaagcagttcatgaggt

SEQ ID NO: 5633 - DNA, 25 bp, Homo sapiens
tgggtcggaagcagttcatgaggtt

SEQ ID NO: 5634 - DNA, 25 bp, Homo sapiens
gggtcggaagcagttcatgaggttt

SEQ ID NO: 5635 - DNA, 25 bp, Homo sapiens
ggtcggaagcagttcatgaggtttg

SEQ ID NO: 5636 - DNA, 25 bp, Homo sapiens
gtcggaagcagttcatgaggtttga

SEQ ID NO: 5637 - DNA, 25 bp, Homo sapiens
tcggaagcagttcatgaggtttgag

SEQ ID NO: 5638 - DNA, 25 bp, Homo sapiens
cggaagcagttcatgaggtttgagt

SEQ ID NO: 5639 - DNA, 25 bp, Homo sapiens
ggaagcagttcatgaggtttgagtg

SEQ ID NO: 5640 - DNA, 25 bp, Homo sapiens
gaagcagttcatgaggtttgagtgg

SEQ ID NO: 5641 - DNA, 25 bp, Homo sapiens
aagcagttcatgaggtttgagtggg

SEQ ID NO: 5642 - DNA, 25 bp, Homo sapiens
agcagttcatgaggtttgagtgggc

SEQ ID NO: 5643 - DNA, 25 bp, Homo sapiens
gcagttcatgaggtttgagtgggca

SEQ ID NO: 5644 - DNA, 25 bp, Homo sapiens
cagttcatgaggtttgagtgggcaa

SEQ ID NO: 5645 - DNA, 25 bp, Homo sapiens
agttcatgaggtttgagtgggcaaa

SEQ ID NO: 5646 - DNA, 25 bp, Homo sapiens
gttcatgaggtttgagtgggcaaac

SEQ ID NO: 5647 - DNA, 25 bp, Homo sapiens
ttcatgaggtttgagtgggcaaact

SEQ ID NO: 5648 - DNA, 25 bp, Homo sapiens
tcatgaggtttgagtgggcaaacta

SEQ ID NO: 5649 - DNA, 25 bp, Homo sapiens
catgaggtttgagtgggcaaactac

SEQ ID NO: 5650 - DNA, 25 bp, Homo sapiens
atgaggtttgagtgggcaaactacg

SEQ ID NO: 5651 - DNA, 25 bp, Homo sapiens
tgaggtttgagtgggcaaactacgc

SEQ ID NO: 5652 - DNA, 25 bp, Homo sapiens
gaggtttgagtgggcaaactacgca

SEQ ID NO: 5653 - DNA, 25 bp, Homo sapiens
aggtttgagtgggcaaactacgcag

SEQ ID NO: 5654 - DNA, 25 bp, Homo sapiens
ggtttgagtgggcaaactacgcagc

SEQ ID NO: 5655 - DNA, 25 bp, Homo sapiens
gtttgagtgggcaaactacgcagct

SEQ ID NO: 5656 - DNA, 25 bp, Homo sapiens
tttgagtgggcaaactacgcagctg

SEQ ID NO: 5657 - DNA, 25 bp, Homo sapiens
ttgagtgggcaaactacgcagctga

SEQ ID NO: 5658 - DNA, 25 bp, Homo sapiens
tgagtgggcaaactacgcagctgag

SEQ ID NO: 5659 - DNA, 25 bp, Homo sapiens
gagtgggcaaactacgcagctgagg

SEQ ID NO: 5660 - DNA, 25 bp, Homo sapiens
agtgggcaaactacgcagctgaggc

SEQ ID NO: 5661 - DNA, 25 bp, Homo sapiens
gtgggcaaactacgcagctgaggcc

SEQ ID NO: 5662 - DNA, 25 bp, Homo sapiens
tgggcaaactacgcagctgaggccc

SEQ ID NO: 5663 - DNA, 25 bp, Homo sapiens
gggcaaactacgcagctgaggccct

SEQ ID NO: 5664 - DNA, 25 bp, Homo sapiens
ggcaaactacgcagctgaggccctg

SEQ ID NO: 5665 - DNA, 25 bp, Homo sapiens
gcaaactacgcagctgaggccctgg

SEQ ID NO: 5666 - DNA, 25 bp, Homo sapiens
caaactacgcagctgaggccctggg

SEQ ID NO: 5667 - DNA, 25 bp, Homo sapiens
aaactacgcagctgaggccctgggc

SEQ ID NO: 5668 - DNA, 25 bp, Homo sapiens
aactacgcagctgaggccctgggct

SEQ ID NO: 5669 - DNA, 25 bp, Homo sapiens
actacgcagctgaggccctgggctg

SEQ ID NO: 5670 - DNA, 25 bp, Homo sapiens
ctacgcagctgaggccctgggctgc

SEQ ID NO: 5671 - DNA, 25 bp, Homo sapiens
tacgcagctgaggccctgggctgcg

SEQ ID NO: 5672 - DNA, 25 bp, Homo sapiens
acgcagctgaggccctgggctgcga

SEQ ID NO: 5673 - DNA, 25 bp, Homo sapiens
cgcagctgaggccctgggctgcgag

SEQ ID NO: 5674 - DNA, 25 bp, Homo sapiens
gcagctgaggccctgggctgcgagt

SEQ ID NO: 5675 - DNA, 25 bp, Homo sapiens
cagctgaggccctgggctgcgagta

SEQ ID NO: 5676 - DNA, 25 bp, Homo sapiens
agctgaggccctgggctgcgagtat

SEQ ID NO: 5677 - DNA, 25 bp, Homo sapiens
gctgaggccctgggctgcgagtatg

SEQ ID NO: 5678 - DNA, 25 bp, Homo sapiens
ctgaggccctgggctgcgagtatga

SEQ ID NO: 5679 - DNA, 25 bp, Homo sapiens
tgaggccctgggctgcgagtatgag

SEQ ID NO: 5680 - DNA, 25 bp, Homo sapiens
gaggccctgggctgcgagtatgagg

SEQ ID NO: 5681 - DNA, 25 bp, Homo sapiens
aggccctgggctgcgagtatgagga

SEQ ID NO: 5682 - DNA, 25 bp, Homo sapiens
ggccctgggctgcgagtatgaggag

SEQ ID NO: 5683 - DNA, 25 bp, Homo sapiens
gccctgggctgcgagtatgaggagc

SEQ ID NO: 5684 - DNA, 25 bp, Homo sapiens
ccctgggctgcgagtatgaggagct

SEQ ID NO: 5685 - DNA, 25 bp, Homo sapiens
cctgggctgcgagtatgaggagctg

SEQ ID NO: 5686 - DNA, 25 bp, Homo sapiens
ctgggctgcgagtatgaggagctga

SEQ ID NO: 5687 - DNA, 25 bp, Homo sapiens
tgggctgcgagtatgaggagctgaa

SEQ ID NO: 5688 - DNA, 25 bp, Homo sapiens
gggctgcgagtatgaggagctgaac

SEQ ID NO: 5689 - DNA, 25 bp, Homo sapiens
ggctgcgagtatgaggagctgaaca

SEQ ID NO: 5690 - DNA, 25 bp, Homo sapiens
gctgcgagtatgaggagctgaacac

SEQ ID NO: 5691 - DNA, 25 bp, Homo sapiens
ctgcgagtatgaggagctgaacacg

SEQ ID NO: 5692 - DNA, 25 bp, Homo sapiens
tgcgagtatgaggagctgaacacgg

SEQ ID NO: 5693 - DNA, 25 bp, Homo sapiens
gcgagtatgaggagctgaacacggc

SEQ ID NO: 5694 - DNA, 25 bp, Homo sapiens
cgagtatgaggagctgaacacggcc

SEQ ID NO: 5695 - DNA, 25 bp, Homo sapiens
gagtatgaggagctgaacacggcca

SEQ ID NO: 5696 - DNA, 25 bp, Homo sapiens
agtatgaggagctgaacacggccac

SEQ ID NO: 5697 - DNA, 25 bp, Homo sapiens
gtatgaggagctgaacacggccacc

SEQ ID NO: 5698 - DNA, 25 bp, Homo sapiens
tatgaggagctgaacacggccacct

SEQ ID NO: 5699 - DNA, 25 bp, Homo sapiens
atgaggagctgaacacggccacctt

SEQ ID NO: 5700 - DNA, 25 bp, Homo sapiens
tgaggagctgaacacggccaccttc

SEQ ID NO: 5701 - DNA, 25 bp, Homo sapiens
gaggagctgaacacggccaccttca

SEQ ID NO: 5702 - DNA, 25 bp, Homo sapiens
aggagctgaacacggccaccttcaa

SEQ ID NO: 5703 - DNA, 25 bp, Homo sapiens
ggagctgaacacggccaccttcaag

SEQ ID NO: 5704 - DNA, 25 bp, Homo sapiens
gagctgaacacggccaccttcaagc

SEQ ID NO: 5705 - DNA, 25 bp, Homo sapiens
agctgaacacggccaccttcaagca

SEQ ID NO: 5706 - DNA, 25 bp, Homo sapiens
gctgaacacggccaccttcaagcac

SEQ ID NO: 5707 - DNA, 25 bp, Homo sapiens
ctgaacacggccaccttcaagcacc

SEQ ID NO: 5708 - DNA, 25 bp, Homo sapiens
tgaacacggccaccttcaagcacca

SEQ ID NO: 5709 - DNA, 25 bp, Homo sapiens
gaacacggccaccttcaagcaccac

SEQ ID NO: 5710 - DNA, 25 bp, Homo sapiens
aacacggccaccttcaagcaccacc

SEQ ID NO: 5711 - DNA, 25 bp, Homo sapiens
acacggccaccttcaagcaccacct

SEQ ID NO: 5712 - DNA, 25 bp, Homo sapiens
cacggccaccttcaagcaccacctt

SEQ ID NO: 5713 - DNA, 25 bp, Homo sapiens
acggccaccttcaagcaccaccttc

SEQ ID NO: 5714 - DNA, 25 bp, Homo sapiens
cggccaccttcaagcaccaccttcg

SEQ ID NO: 5715 - DNA, 25 bp, Homo sapiens
ggccaccttcaagcaccaccttcga

SEQ ID NO: 5716 - DNA, 25 bp, Homo sapiens
gccaccttcaagcaccaccttcgac

SEQ ID NO: 5717 - DNA, 25 bp, Homo sapiens
ccaccttcaagcaccaccttcgaca

SEQ ID NO: 5718 - DNA, 25 bp, Homo sapiens
caccttcaagcaccaccttcgacag

SEQ ID NO: 5719 - DNA, 25 bp, Homo sapiens
accttcaagcaccaccttcgacaga

SEQ ID NO: 5720 - DNA, 25 bp, Homo sapiens
ccttcaagcaccaccttcgacagat

SEQ ID NO: 5721 - DNA, 25 bp, Homo sapiens
cttcaagcaccaccttcgacagatc

SEQ ID NO: 5722 - DNA, 25 bp, Homo sapiens
ttcaagcaccaccttcgacagatca

SEQ ID NO: 5723 - DNA, 25 bp, Homo sapiens
tcaagcaccaccttcgacagatcat

SEQ ID NO: 5724 - DNA, 25 bp, Homo sapiens
caagcaccaccttcgacagatcatc

SEQ ID NO: 5725 - DNA, 25 bp, Homo sapiens
aagcaccaccttcgacagatcatcc

SEQ ID NO: 5726 - DNA, 25 bp, Homo sapiens
agcaccaccttcgacagatcatcca

SEQ ID NO: 5727 - DNA, 25 bp, Homo sapiens
gcaccaccttcgacagatcatccag

SEQ ID NO: 5728 - DNA, 25 bp, Homo sapiens
caccaccttcgacagatcatccagc

SEQ ID NO: 5729 - DNA, 25 bp, Homo sapiens
accaccttcgacagatcatccagca

SEQ ID NO: 5730 - DNA, 25 bp, Homo sapiens
ccaccttcgacagatcatccagcaa

SEQ ID NO: 5731 - DNA, 25 bp, Homo sapiens
caccttcgacagatcatccagcaaa

SEQ ID NO: 5732 - DNA, 25 bp, Homo sapiens
accttcgacagatcatccagcaaat

SEQ ID NO: 5733 - DNA, 25 bp, Homo sapiens
ccttcgacagatcatccagcaaatg

SEQ ID NO: 5734 - DNA, 25 bp, Homo sapiens
cttcgacagatcatccagcaaatga

SEQ ID NO: 5735 - DNA, 25 bp, Homo sapiens
ttcgacagatcatccagcaaatgac

SEQ ID NO: 5736 - DNA, 25 bp, Homo sapiens
tcgacagatcatccagcaaatgacg

SEQ ID NO: 5737 - DNA, 25 bp, Homo sapiens
cgacagatcatccagcaaatgacgt

SEQ ID NO: 5738 - DNA, 25 bp, Homo sapiens
gacagatcatccagcaaatgacgtt

SEQ ID NO: 5739 - DNA, 25 bp, Homo sapiens
acagatcatccagcaaatgacgttt

SEQ ID NO: 5740 - DNA, 25 bp, Homo sapiens
cagatcatccagcaaatgacgtttg

SEQ ID NO: 5741 - DNA, 25 bp, Homo sapiens
agatcatccagcaaatgacgtttgg

SEQ ID NO: 5742 - DNA, 25 bp, Homo sapiens
gatcatccagcaaatgacgtttggg

SEQ ID NO: 5743 - DNA, 25 bp, Homo sapiens
atcatccagcaaatgacgtttgggc

SEQ ID NO: 5744 - DNA, 25 bp, Homo sapiens
tcatccagcaaatgacgtttgggcc

SEQ ID NO: 5745 - DNA, 25 bp, Homo sapiens
catccagcaaatgacgtttgggcca

SEQ ID NO: 5746 - DNA, 25 bp, Homo sapiens
atccagcaaatgacgtttgggccaa

SEQ ID NO: 5747 - DNA, 25 bp, Homo sapiens
tccagcaaatgacgtttgggccaag

SEQ ID NO: 5748 - DNA, 25 bp, Homo sapiens
ccagcaaatgacgtttgggccaagc

SEQ ID NO: 5749 - DNA, 25 bp, Homo sapiens
cagcaaatgacgtttgggccaagcc

SEQ ID NO: 5750 - DNA, 25 bp, Homo sapiens
agcaaatgacgtttgggccaagccg

SEQ ID NO: 5751 - DNA, 25 bp, Homo sapiens
gcaaatgacgtttgggccaagccga

SEQ ID NO: 5752 - DNA, 25 bp, Homo sapiens
caaatgacgtttgggccaagccgat

SEQ ID NO: 5753 - DNA, 25 bp, Homo sapiens
aaatgacgtttgggccaagccgatg

SEQ ID NO: 5754 - DNA, 25 bp, Homo sapiens
aatgacgtttgggccaagccgatgg

SEQ ID NO: 5755 - DNA, 25 bp, Homo sapiens
atgacgtttgggccaagccgatggg

SEQ ID NO: 5756 - DNA, 25 bp, Homo sapiens
tgacgtttgggccaagccgatgggg

SEQ ID NO: 5757 - DNA, 25 bp, Homo sapiens
gacgtttgggccaagccgatggggc

SEQ ID NO: 5758 - DNA, 25 bp, Homo sapiens
acgtttgggccaagccgatggggcc

SEQ ID NO: 5759 - DNA, 25 bp, Homo sapiens
cgtttgggccaagccgatggggcct

SEQ ID NO: 5760 - DNA, 25 bp, Homo sapiens
gtttgggccaagccgatggggcctc

SEQ ID NO: 5761 - DNA, 25 bp, Homo sapiens
tttgggccaagccgatggggcctcg

SEQ ID NO: 5762 - DNA, 25 bp, Homo sapiens
ttgggccaagccgatggggcctcga

SEQ ID NO: 5763 - DNA, 25 bp, Homo sapiens
tgggccaagccgatggggcctcgag

SEQ ID NO: 5764 - DNA, 25 bp, Homo sapiens
gggccaagccgatggggcctcgagg

SEQ ID NO: 5765 - DNA, 25 bp, Homo sapiens
ggccaagccgatggggcctcgagga

SEQ ID NO: 5766 - DNA, 25 bp, Homo sapiens
gccaagccgatggggcctcgaggat

SEQ ID NO: 5767 - DNA, 25 bp, Homo sapiens
ccaagccgatggggcctcgaggatg

SEQ ID NO: 5768 - DNA, 25 bp, Homo sapiens
caagccgatggggcctcgaggatga

SEQ ID NO: 5769 - DNA, 25 bp, Homo sapiens
aagccgatggggcctcgaggatgag

SEQ ID NO: 5770 - DNA, 25 bp, Homo sapiens
agccgatggggcctcgaggatgagg

SEQ ID NO: 5771 - DNA, 25 bp, Homo sapiens
gccgatggggcctcgaggatgagga

SEQ ID NO: 5772 - DNA, 25 bp, Homo sapiens
ccgatggggcctcgaggatgaggaa

SEQ ID NO: 5773 - DNA, 25 bp, Homo sapiens
cgatggggcctcgaggatgaggaaa

SEQ ID NO: 5774 - DNA, 25 bp, Homo sapiens
gatggggcctcgaggatgaggaaac

SEQ ID NO: 5775 - DNA, 25 bp, Homo sapiens
atggggcctcgaggatgaggaaacc

SEQ ID NO: 5776 - DNA, 25 bp, Homo sapiens
tggggcctcgaggatgaggaaacca

SEQ ID NO: 5777 - DNA, 25 bp, Homo sapiens
ggggcctcgaggatgaggaaaccag

SEQ ID NO: 5778 - DNA, 25 bp, Homo sapiens
gggcctcgaggatgaggaaaccagc

SEQ ID NO: 5779 - DNA, 25 bp, Homo sapiens
ggcctcgaggatgaggaaaccagct

SEQ ID NO: 5780 - DNA, 25 bp, Homo sapiens
gcctcgaggatgaggaaaccagctc

SEQ ID NO: 5781 - DNA, 25 bp, Homo sapiens
cctcgaggatgaggaaaccagctca

SEQ ID NO: 5782 - DNA, 25 bp, Homo sapiens
ctcgaggatgaggaaaccagctcag

SEQ ID NO: 5783 - DNA, 25 bp, Homo sapiens
tcgaggatgaggaaaccagctcagg

SEQ ID NO: 5784 - DNA, 25 bp, Homo sapiens
cgaggatgaggaaaccagctcaggg

SEQ ID NO: 5785 - DNA, 25 bp, Homo sapiens
gaggatgaggaaaccagctcagggc

SEQ ID NO: 5786 - DNA, 25 bp, Homo sapiens
aggatgaggaaaccagctcagggct

SEQ ID NO: 5787 - DNA, 25 bp, Homo sapiens
ggatgaggaaaccagctcagggctc

SEQ ID NO: 5788 - DNA, 25 bp, Homo sapiens
gatgaggaaaccagctcagggctca

SEQ ID NO: 5789 - DNA, 25 bp, Homo sapiens
atgaggaaaccagctcagggctcaa

SEQ ID NO: 5790 - DNA, 25 bp, Homo sapiens
tgaggaaaccagctcagggctcaag

SEQ ID NO: 5791 - DNA, 25 bp, Homo sapiens
gaggaaaccagctcagggctcaaga

SEQ ID NO: 5792 - DNA, 25 bp, Homo sapiens
aggaaaccagctcagggctcaagat

SEQ ID NO: 5793 - DNA, 25 bp, Homo sapiens
ggaaaccagctcagggctcaagatg

SEQ ID NO: 5794 - DNA, 25 bp, Homo sapiens
gaaaccagctcagggctcaagatga

SEQ ID NO: 5795 - DNA, 25 bp, Homo sapiens
aaaccagctcagggctcaagatgac

SEQ ID NO: 5796 - DNA, 25 bp, Homo sapiens
aaccagctcagggctcaagatgaca

SEQ ID NO: 5797 - DNA, 25 bp, Homo sapiens
accagctcagggctcaagatgacag

SEQ ID NO: 5798 - DNA, 25 bp, Homo sapiens
ccagctcagggctcaagatgacagg

SEQ ID NO: 5799 - DNA, 25 bp, Homo sapiens
cagctcagggctcaagatgacagga

SEQ ID NO: 5800 - DNA, 25 bp, Homo sapiens
agctcagggctcaagatgacaggag

SEQ ID NO: 5801 - DNA, 25 bp, Homo sapiens
gctcagggctcaagatgacaggagt

SEQ ID NO: 5802 - DNA, 25 bp, Homo sapiens
ctcagggctcaagatgacaggagtg

SEQ ID NO: 5803 - DNA, 25 bp, Homo sapiens
tcagggctcaagatgacaggagtgg

SEQ ID NO: 5804 - DNA, 25 bp, Homo sapiens
cagggctcaagatgacaggagtgga

SEQ ID NO: 5805 - DNA, 25 bp, Homo sapiens
agggctcaagatgacaggagtggac

SEQ ID NO: 5806 - DNA, 25 bp, Homo sapiens
gggctcaagatgacaggagtggact

SEQ ID NO: 5807 - DNA, 25 bp, Homo sapiens
ggctcaagatgacaggagtggactg

SEQ ID NO: 5808 - DNA, 25 bp, Homo sapiens
gctcaagatgacaggagtggactgt

SEQ ID NO: 5809 - DNA, 25 bp, Homo sapiens
ctcaagatgacaggagtggactgtg

SEQ ID NO: 5810 - DNA, 25 bp, Homo sapiens
tcaagatgacaggagtggactgtgt

SEQ ID NO: 5811 - DNA, 25 bp, Homo sapiens
caagatgacaggagtggactgtgtg

SEQ ID NO: 5812 - DNA, 25 bp, Homo sapiens
aagatgacaggagtggactgtgtgg

SEQ ID NO: 5813 - DNA, 25 bp, Homo sapiens
agatgacaggagtggactgtgtgga

SEQ ID NO: 5814 - DNA, 25 bp, Homo sapiens
gatgacaggagtggactgtgtggag

SEQ ID NO: 5815 - DNA, 25 bp, Homo sapiens
atgacaggagtggactgtgtggagg

SEQ ID NO: 5816 - DNA, 25 bp, Homo sapiens
tgacaggagtggactgtgtggaggg

SEQ ID NO: 5817 - DNA, 25 bp, Homo sapiens
gacaggagtggactgtgtggagggg

SEQ ID NO: 5818 - DNA, 25 bp, Homo sapiens
acaggagtggactgtgtggagggga

SEQ ID NO: 5819 - DNA, 25 bp, Homo sapiens
caggagtggactgtgtggaggggat

SEQ ID NO: 5820 - DNA, 25 bp, Homo sapiens
aggagtggactgtgtggaggggatg

SEQ ID NO: 5821 - DNA, 25 bp, Homo sapiens
ggagtggactgtgtggaggggatgg

SEQ ID NO: 5822 - DNA, 25 bp, Homo sapiens
gagtggactgtgtggaggggatggc

SEQ ID NO: 5823 - DNA, 25 bp, Homo sapiens
agtggactgtgtggaggggatggcc

SEQ ID NO: 5824 - DNA, 25 bp, Homo sapiens
gtggactgtgtggaggggatggcct

SEQ ID NO: 5825 - DNA, 25 bp, Homo sapiens
tggactgtgtggaggggatggcctc

SEQ ID NO: 5826 - DNA, 25 bp, Homo sapiens
ggactgtgtggaggggatggcctcg

SEQ ID NO: 5827 - DNA, 25 bp, Homo sapiens
gactgtgtggaggggatggcctcgg

SEQ ID NO: 5828 - DNA, 25 bp, Homo sapiens
actgtgtggaggggatggcctcggg

SEQ ID NO: 5829 - DNA, 25 bp, Homo sapiens
ctgtgtggaggggatggcctcgggc

SEQ ID NO: 5830 - DNA, 25 bp, Homo sapiens
tgtgtggaggggatggcctcgggcc

SEQ ID NO: 5831 - DNA, 25 bp, Homo sapiens
gtgtggaggggatggcctcgggcct

SEQ ID NO: 5832 - DNA, 25 bp, Homo sapiens
tgtggaggggatggcctcgggcctg

SEQ ID NO: 5833 - DNA, 25 bp, Homo sapiens
gtggaggggatggcctcgggcctgt

SEQ ID NO: 5834 - DNA, 25 bp, Homo sapiens
tggaggggatggcctcgggcctgta

SEQ ID NO: 5835 - DNA, 25 bp, Homo sapiens
ggaggggatggcctcgggcctgtac

SEQ ID NO: 5836 - DNA, 25 bp, Homo sapiens
gaggggatggcctcgggcctgtacc

SEQ ID NO: 5837 - DNA, 25 bp, Homo sapiens
aggggatggcctcgggcctgtacca

SEQ ID NO: 5838 - DNA, 25 bp, Homo sapiens
ggggatggcctcgggcctgtaccag

SEQ ID NO: 5839 - DNA, 25 bp, Homo sapiens
gggatggcctcgggcctgtaccagg

SEQ ID NO: 5840 - DNA, 25 bp, Homo sapiens
ggatggcctcgggcctgtaccagga

SEQ ID NO: 5841 - DNA, 25 bp, Homo sapiens
gatggcctcgggcctgtaccaggaa

SEQ ID NO: 5842 - DNA, 25 bp, Homo sapiens
atggcctcgggcctgtaccaggaac

SEQ ID NO: 5843 - DNA, 25 bp, Homo sapiens
tggcctcgggcctgtaccaggaact

SEQ ID NO: 5844 - DNA, 25 bp, Homo sapiens
ggcctcgggcctgtaccaggaactc

SEQ ID NO: 5845 - DNA, 25 bp, Homo sapiens
gcctcgggcctgtaccaggaactct

SEQ ID NO: 5846 - DNA, 25 bp, Homo sapiens
cctcgggcctgtaccaggaactctt

SEQ ID NO: 5847 - DNA, 25 bp, Homo sapiens
ctcgggcctgtaccaggaactcttt

SEQ ID NO: 5848 - DNA, 25 bp, Homo sapiens
tcgggcctgtaccaggaactctttg

SEQ ID NO: 5849 - DNA, 25 bp, Homo sapiens
cgggcctgtaccaggaactctttgc

SEQ ID NO: 5850 - DNA, 25 bp, Homo sapiens
gggcctgtaccaggaactctttgcg

SEQ ID NO: 5851 - DNA, 25 bp, Homo sapiens
ggcctgtaccaggaactctttgcgg

SEQ ID NO: 5852 - DNA, 25 bp, Homo sapiens
gcctgtaccaggaactctttgcggc

SEQ ID NO: 5853 - DNA, 25 bp, Homo sapiens
cctgtaccaggaactctttgcggct

SEQ ID NO: 5854 - DNA, 25 bp, Homo sapiens
ctgtaccaggaactctttgcggctg

SEQ ID NO: 5855 - DNA, 25 bp, Homo sapiens
tgtaccaggaactctttgcggctgt

SEQ ID NO: 5856 - DNA, 25 bp, Homo sapiens
gtaccaggaactctttgcggctgtg

SEQ ID NO: 5857 - DNA, 25 bp, Homo sapiens
taccaggaactctttgcggctgtgg

SEQ ID NO: 5858 - DNA, 25 bp, Homo sapiens
accaggaactctttgcggctgtggt

SEQ ID NO: 5859 - DNA, 25 bp, Homo sapiens
ccaggaactctttgcggctgtggtc

SEQ ID NO: 5860 - DNA, 25 bp, Homo sapiens
caggaactctttgcggctgtggtct

SEQ ID NO: 5861 - DNA, 25 bp, Homo sapiens
aggaactctttgcggctgtggtctc

SEQ ID NO: 5862 - DNA, 25 bp, Homo sapiens
ggaactctttgcggctgtggtctca

SEQ ID NO: 5863 - DNA, 25 bp, Homo sapiens
gaactctttgcggctgtggtctcac

SEQ ID NO: 5864 - DNA, 25 bp, Homo sapiens
aactctttgcggctgtggtctcact

SEQ ID NO: 5865 - DNA, 25 bp, Homo sapiens
actctttgcggctgtggtctcactc

SEQ ID NO: 5866 - DNA, 25 bp, Homo sapiens
ctctttgcggctgtggtctcactca

SEQ ID NO: 5867 - DNA, 25 bp, Homo sapiens
tctttgcggctgtggtctcactcat

SEQ ID NO: 5868 - DNA, 25 bp, Homo sapiens
ctttgcggctgtggtctcactcatc

SEQ ID NO: 5869 - DNA, 25 bp, Homo sapiens
tttgcggctgtggtctcactcatca

SEQ ID NO: 5870 - DNA, 25 bp, Homo sapiens
ttgcggctgtggtctcactcatcaa

SEQ ID NO: 5871 - DNA, 25 bp, Homo sapiens
tgcggctgtggtctcactcatcaac

SEQ ID NO: 5872 - DNA, 17 bp, Homo sapiens
cccggacccctccccag

SEQ ID NO: 5873 - DNA, 17 bp, Homo sapiens
ccggacccctccccagg

SEQ ID NO: 5874 - DNA, 17 bp, Homo sapiens
cggacccctccccaggg

SEQ ID NO: 5875 - DNA, 17 bp, Homo sapiens
ggacccctccccaggga

SEQ ID NO: 5876 - DNA, 17 bp, Homo sapiens
gacccctccccagggac

SEQ ID NO: 5877 - DNA, 17 bp, Homo sapiens
acccctccccagggacc

SEQ ID NO: 5878 - DNA, 17 bp, Homo sapiens
cccctccccagggacca

SEQ ID NO: 5879 - DNA, 17 bp, Homo sapiens
ccctccccagggaccac

SEQ ID NO: 5880 - DNA, 17 bp, Homo sapiens
cctccccagggaccacc

SEQ ID NO: 5881 - DNA, 17 bp, Homo sapiens
ctccccagggaccaccg

SEQ ID NO: 5882 - DNA, 17 bp, Homo sapiens
tccccagggaccaccgt

SEQ ID NO: 5883 - DNA, 17 bp, Homo sapiens
ccccagggaccaccgtg

SEQ ID NO: 5884 - DNA, 17 bp, Homo sapiens
cccagggaccaccgtgg

SEQ ID NO: 5885 - DNA, 17 bp, Homo sapiens
ccagggaccaccgtggc

SEQ ID NO: 5886 - DNA, 17 bp, Homo sapiens
cagggaccaccgtggct

SEQ ID NO: 5887 - DNA, 17 bp, Homo sapiens
agggaccaccgtggctg

SEQ ID NO: 5888 - DNA, 17 bp, Homo sapiens
gggaccaccgtggctgt

SEQ ID NO: 5889 - DNA, 17 bp, Homo sapiens
ggaccaccgtggctgtt

SEQ ID NO: 5890 - DNA, 17 bp, Homo sapiens
gaccaccgtggctgttg

SEQ ID NO: 5891 - DNA, 17 bp, Homo sapiens
accaccgtggctgttgt

SEQ ID NO: 5892 - DNA, 17 bp, Homo sapiens
ccaccgtggctgttgtg

SEQ ID NO: 5893 - DNA, 17 bp, Homo sapiens
caccgtggctgttgtgg

SEQ ID NO: 5894 - DNA, 17 bp, Homo sapiens
accgtggctgttgtgga

SEQ ID NO: 5895 - DNA, 17 bp, Homo sapiens
ccgtggctgttgtggat

SEQ ID NO: 5896 - DNA, 17 bp, Homo sapiens
cgtggctgttgtggatc

SEQ ID NO: 5897 - DNA, 17 bp, Homo sapiens
gtggctgttgtggatca

SEQ ID NO: 5898 - DNA, 17 bp, Homo sapiens
tggctgttgtggatcaa

SEQ ID NO: 5899 - DNA, 17 bp, Homo sapiens
ggctgttgtggatcaaa

SEQ ID NO: 5900 - DNA, 17 bp, Homo sapiens
gctgttgtggatcaaaa

SEQ ID NO: 5901 - DNA, 17 bp, Homo sapiens
ctgttgtggatcaaaat

SEQ ID NO: 5902 - DNA, 17 bp, Homo sapiens
tgttgtggatcaaaatc

SEQ ID NO: 5903 - DNA, 17 bp, Homo sapiens
gttgtggatcaaaatcc

SEQ ID NO: 5904 - DNA, 17 bp, Homo sapiens
ttgtggatcaaaatccc

SEQ ID NO: 5905 - DNA, 17 bp, Homo sapiens
tgtggatcaaaatccct

SEQ ID NO: 5906 - DNA, 17 bp, Homo sapiens
gtggatcaaaatccctc

SEQ ID NO: 5907 - DNA, 17 bp, Homo sapiens
tggatcaaaatccctct

SEQ ID NO: 5908 - DNA, 17 bp, Homo sapiens
ggatcaaaatccctctc

SEQ ID NO: 5909 - DNA, 17 bp, Homo sapiens
gatcaaaatccctctca

SEQ ID NO: 5910 - DNA, 17 bp, Homo sapiens
atcaaaatccctctcag

SEQ ID NO: 5911 - DNA, 17 bp, Homo sapiens
tcaaaatccctctcagc

SEQ ID NO: 5912 - DNA, 17 bp, Homo sapiens
caaaatccctctcagca

SEQ ID NO: 5913 - DNA, 17 bp, Homo sapiens
aaaatccctctcagcag

SEQ ID NO: 5914 - DNA, 17 bp, Homo sapiens
aaatccctctcagcagg

SEQ ID NO: 5915 - DNA, 17 bp, Homo sapiens
aatccctctcagcaggt

SEQ ID NO: 5916 - DNA, 17 bp, Homo sapiens
atccctctcagcaggtc

SEQ ID NO: 5917 - DNA, 17 bp, Homo sapiens
tccctctcagcaggtcc

SEQ ID NO: 5918 - DNA, 17 bp, Homo sapiens
ccctctcagcaggtccg

SEQ ID NO: 5919 - DNA, 17 bp, Homo sapiens
cctctcagcaggtccgc

SEQ ID NO: 5920 - DNA, 17 bp, Homo sapiens
ctctcagcaggtccgct

SEQ ID NO: 5921 - DNA, 17 bp, Homo sapiens
tctcagcaggtccgctt

SEQ ID NO: 5922 - DNA, 17 bp, Homo sapiens
ctcagcaggtccgctta

SEQ ID NO: 5923 - DNA, 17 bp, Homo sapiens
tcagcaggtccgcttac

SEQ ID NO: 5924 - DNA, 17 bp, Homo sapiens
cagcaggtccgcttacc

SEQ ID NO: 5925 - DNA, 17 bp, Homo sapiens
agcaggtccgcttacca

SEQ ID NO: 5926 - DNA, 17 bp, Homo sapiens
gcaggtccgcttaccag

SEQ ID NO: 5927 - DNA, 17 bp, Homo sapiens
caggtccgcttaccagc

SEQ ID NO: 5928 - DNA, 17 bp, Homo sapiens
aggtccgcttaccagct

SEQ ID NO: 5929 - DNA, 17 bp, Homo sapiens
ggtccgcttaccagctg

SEQ ID NO: 5930 - DNA, 17 bp, Homo sapiens
gtccgcttaccagctgg

SEQ ID NO: 5931 - DNA, 17 bp, Homo sapiens
tccgcttaccagctgga

SEQ ID NO: 5932 - DNA, 17 bp, Homo sapiens
ccgcttaccagctggag

SEQ ID NO: 5933 - DNA, 17 bp, Homo sapiens
cgcttaccagctggagg

SEQ ID NO: 5934 - DNA, 17 bp, Homo sapiens
gcttaccagctggagga

SEQ ID NO: 5935 - DNA, 17 bp, Homo sapiens
cttaccagctggaggag

SEQ ID NO: 5936 - DNA, 17 bp, Homo sapiens
ttaccagctggaggagg

SEQ ID NO: 5937 - DNA, 17 bp, Homo sapiens
taccagctggaggaggt

SEQ ID NO: 5938 - DNA, 17 bp, Homo sapiens
accagctggaggaggtg

SEQ ID NO: 5939 - DNA, 17 bp, Homo sapiens
ccagctggaggaggtgc

SEQ ID NO: 5940 - DNA, 17 bp, Homo sapiens
cagctggaggaggtgcc

SEQ ID NO: 5941 - DNA, 17 bp, Homo sapiens
agctggaggaggtgccc

SEQ ID NO: 5942 - DNA, 17 bp, Homo sapiens
gctggaggaggtgccca

SEQ ID NO: 5943 - DNA, 17 bp, Homo sapiens
ctggaggaggtgcccag

SEQ ID NO: 5944 - DNA, 17 bp, Homo sapiens
tggaggaggtgcccagg

SEQ ID NO: 5945 - DNA, 17 bp, Homo sapiens
ggaggaggtgcccagga

SEQ ID NO: 5946 - DNA, 17 bp, Homo sapiens
gaggaggtgcccaggat

SEQ ID NO: 5947 - DNA, 17 bp, Homo sapiens
aggaggtgcccaggatg

SEQ ID NO: 5948 - DNA, 17 bp, Homo sapiens
ggaggtgcccaggatgc

SEQ ID NO: 5949 - DNA, 17 bp, Homo sapiens
gaggtgcccaggatgcc

SEQ ID NO: 5950 - DNA, 17 bp, Homo sapiens
aggtgcccaggatgcca

SEQ ID NO: 5951 - DNA, 17 bp, Homo sapiens
ggtgcccaggatgccag

SEQ ID NO: 5952 - DNA, 17 bp, Homo sapiens
gtgcccaggatgccaga

SEQ ID NO: 5953 - DNA, 17 bp, Homo sapiens
tgcccaggatgccagag

SEQ ID NO: 5954 - DNA, 17 bp, Homo sapiens
gcccaggatgccagagg

SEQ ID NO: 5955 - DNA, 17 bp, Homo sapiens
cccaggatgccagaggc

SEQ ID NO: 5956 - DNA, 17 bp, Homo sapiens
ccaggatgccagaggcc

SEQ ID NO: 5957 - DNA, 17 bp, Homo sapiens
caggatgccagaggcct

SEQ ID NO: 5958 - DNA, 17 bp, Homo sapiens
aggatgccagaggcctt

SEQ ID NO: 5959 - DNA, 17 bp, Homo sapiens
ggatgccagaggccttt

SEQ ID NO: 5960 - DNA, 17 bp, Homo sapiens
gatgccagaggcctttt

SEQ ID NO: 5961 - DNA, 17 bp, Homo sapiens
atgccagaggccttttc

SEQ ID NO: 5962 - DNA, 17 bp, Homo sapiens
tgccagaggccttttct

SEQ ID NO: 5963 - DNA, 17 bp, Homo sapiens
gccagaggccttttctg

SEQ ID NO: 5964 - DNA, 17 bp, Homo sapiens
ccagaggccttttctgg

SEQ ID NO: 5965 - DNA, 17 bp, Homo sapiens
cagaggccttttctggg

SEQ ID NO: 5966 - DNA, 17 bp, Homo sapiens
agaggccttttctgggt

SEQ ID NO: 5967 - DNA, 17 bp, Homo sapiens
gaggccttttctgggtc

SEQ ID NO: 5968 - DNA, 17 bp, Homo sapiens
aggccttttctgggtct

SEQ ID NO: 5969 - DNA, 17 bp, Homo sapiens
ggccttttctgggtctt

SEQ ID NO: 5970 - DNA, 17 bp, Homo sapiens
gccttttctgggtctta

SEQ ID NO: 5971 - DNA, 17 bp, Homo sapiens
ccttttctgggtcttag

SEQ ID NO: 5972 - DNA, 17 bp, Homo sapiens
cttttctgggtcttaga

SEQ ID NO: 5973 - DNA, 17 bp, Homo sapiens
ttttctgggtcttagat

SEQ ID NO: 5974 - DNA, 17 bp, Homo sapiens
tttctgggtcttagatg

SEQ ID NO: 5975 - DNA, 17 bp, Homo sapiens
ttctgggtcttagatga

SEQ ID NO: 5976 - DNA, 17 bp, Homo sapiens
tctgggtcttagatgag

SEQ ID NO: 5977 - DNA, 17 bp, Homo sapiens
ctgggtcttagatgagg

SEQ ID NO: 5978 - DNA, 17 bp, Homo sapiens
tgggtcttagatgagga

SEQ ID NO: 5979 - DNA, 17 bp, Homo sapiens
gggtcttagatgaggaa

SEQ ID NO: 5980 - DNA, 17 bp, Homo sapiens
ggtcttagatgaggaag

SEQ ID NO: 5981 - DNA, 17 bp, Homo sapiens
gtcttagatgaggaagt

SEQ ID NO: 5982 - DNA, 17 bp, Homo sapiens
tcttagatgaggaagtc

SEQ ID NO: 5983 - DNA, 17 bp, Homo sapiens
cttagatgaggaagtcc

SEQ ID NO: 5984 - DNA, 17 bp, Homo sapiens
ttagatgaggaagtcca

SEQ ID NO: 5985 - DNA, 17 bp, Homo sapiens
tagatgaggaagtccat

SEQ ID NO: 5986 - DNA, 17 bp, Homo sapiens
agatgaggaagtccatg

SEQ ID NO: 5987 - DNA, 17 bp, Homo sapiens
gatgaggaagtccatgt

SEQ ID NO: 5988 - DNA, 17 bp, Homo sapiens
atgaggaagtccatgta

SEQ ID NO: 5989 - DNA, 17 bp, Homo sapiens
tgaggaagtccatgtag

SEQ ID NO: 5990 - DNA, 17 bp, Homo sapiens
gaggaagtccatgtaga

SEQ ID NO: 5991 - DNA, 17 bp, Homo sapiens
aggaagtccatgtagag

SEQ ID NO: 5992 - DNA, 17 bp, Homo sapiens
ggaagtccatgtagagg

SEQ ID NO: 5993 - DNA, 17 bp, Homo sapiens
gaagtccatgtagaggg

SEQ ID NO: 5994 - DNA, 17 bp, Homo sapiens
aagtccatgtagagggc

SEQ ID NO: 5995 - DNA, 17 bp, Homo sapiens
agtccatgtagagggct

SEQ ID NO: 5996 - DNA, 17 bp, Homo sapiens
gtccatgtagagggctc

SEQ ID NO: 5997 - DNA, 17 bp, Homo sapiens
tccatgtagagggctcc

SEQ ID NO: 5998 - DNA, 17 bp, Homo sapiens
ccatgtagagggctcca

SEQ ID NO: 5999 - DNA, 17 bp, Homo sapiens
catgtagagggctccag

SEQ ID NO: 6000 - DNA, 17 bp, Homo sapiens
atgtagagggctccagt

SEQ ID NO: 6001 - DNA, 17 bp, Homo sapiens
tgtagagggctccagtg

SEQ ID NO: 6002 - DNA, 17 bp, Homo sapiens
gtagagggctccagtga

SEQ ID NO: 6003 - DNA, 17 bp, Homo sapiens
tagagggctccagtgac

SEQ ID NO: 6004 - DNA, 17 bp, Homo sapiens
agagggctccagtgaca

SEQ ID NO: 6005 - DNA, 17 bp, Homo sapiens
gagggctccagtgacag

SEQ ID NO: 6006 - DNA, 17 bp, Homo sapiens
agggctccagtgacagt

SEQ ID NO: 6007 - DNA, 17 bp, Homo sapiens
gggctccagtgacagtg

SEQ ID NO: 6008 - DNA, 17 bp, Homo sapiens
ggctccagtgacagtgt

SEQ ID NO: 6009 - DNA, 17 bp, Homo sapiens
gctccagtgacagtgtg

SEQ ID NO: 6010 - DNA, 17 bp, Homo sapiens
ctccagtgacagtgtgg

SEQ ID NO: 6011 - DNA, 17 bp, Homo sapiens
tccagtgacagtgtggt

SEQ ID NO: 6012 - DNA, 17 bp, Homo sapiens
ccagtgacagtgtggtg

SEQ ID NO: 6013 - DNA, 17 bp, Homo sapiens
cagtgacagtgtggtgc

SEQ ID NO: 6014 - DNA, 17 bp, Homo sapiens
agtgacagtgtggtgct

SEQ ID NO: 6015 - DNA, 17 bp, Homo sapiens
gtgacagtgtggtgctc

SEQ ID NO: 6016 - DNA, 17 bp, Homo sapiens
tgacagtgtggtgctcg

SEQ ID NO: 6017 - DNA, 17 bp, Homo sapiens
gacagtgtggtgctcga

SEQ ID NO: 6018 - DNA, 17 bp, Homo sapiens
acagtgtggtgctcgag

SEQ ID NO: 6019 - DNA, 17 bp, Homo sapiens
cagtgtggtgctcgagc

SEQ ID NO: 6020 - DNA, 17 bp, Homo sapiens
agtgtggtgctcgagcg

SEQ ID NO: 6021 - DNA, 17 bp, Homo sapiens
gtgtggtgctcgagcgt

SEQ ID NO: 6022 - DNA, 17 bp, Homo sapiens
tgtggtgctcgagcgtc

SEQ ID NO: 6023 - DNA, 17 bp, Homo sapiens
gtggtgctcgagcgtct

SEQ ID NO: 6024 - DNA, 17 bp, Homo sapiens
tggtgctcgagcgtctg

SEQ ID NO: 6025 - DNA, 17 bp, Homo sapiens
ggtgctcgagcgtctgt

SEQ ID NO: 6026 - DNA, 17 bp, Homo sapiens
gtgctcgagcgtctgtg

SEQ ID NO: 6027 - DNA, 17 bp, Homo sapiens
tgctcgagcgtctgtgt

SEQ ID NO: 6028 - DNA, 17 bp, Homo sapiens
gctcgagcgtctgtgtg

SEQ ID NO: 6029 - DNA, 17 bp, Homo sapiens
ctcgagcgtctgtgtgc

SEQ ID NO: 6030 - DNA, 17 bp, Homo sapiens
tcgagcgtctgtgtgct

SEQ ID NO: 6031 - DNA, 17 bp, Homo sapiens
cgagcgtctgtgtgcta

SEQ ID NO: 6032 - DNA, 17 bp, Homo sapiens
gagcgtctgtgtgctac

SEQ ID NO: 6033 - DNA, 17 bp, Homo sapiens
agcgtctgtgtgctact

SEQ ID NO: 6034 - DNA, 17 bp, Homo sapiens
gcgtctgtgtgctactt

SEQ ID NO: 6035 - DNA, 17 bp, Homo sapiens
cgtctgtgtgctacttt

SEQ ID NO: 6036 - DNA, 17 bp, Homo sapiens
gtctgtgtgctactttc

SEQ ID NO: 6037 - DNA, 17 bp, Homo sapiens
tctgtgtgctactttcg

SEQ ID NO: 6038 - DNA, 17 bp, Homo sapiens
ctgtgtgctactttcga

SEQ ID NO: 6039 - DNA, 17 bp, Homo sapiens
tgtgtgctactttcgag

SEQ ID NO: 6040 - DNA, 17 bp, Homo sapiens
gtgtgctactttcgaga

SEQ ID NO: 6041 - DNA, 17 bp, Homo sapiens
tgtgctactttcgagaa

SEQ ID NO: 6042 - DNA, 17 bp, Homo sapiens
gtgctactttcgagaag

SEQ ID NO: 6043 - DNA, 17 bp, Homo sapiens
tgctactttcgagaaga

SEQ ID NO: 6044 - DNA, 17 bp, Homo sapiens
gctactttcgagaagaa

SEQ ID NO: 6045 - DNA, 17 bp, Homo sapiens
ctactttcgagaagaaa

SEQ ID NO: 6046 - DNA, 17 bp, Homo sapiens
tactttcgagaagaaag

SEQ ID NO: 6047 - DNA, 17 bp, Homo sapiens
actttcgagaagaaagg

SEQ ID NO: 6048 - DNA, 17 bp, Homo sapiens
ctttcgagaagaaagga

SEQ ID NO: 6049 - DNA, 17 bp, Homo sapiens
tttcgagaagaaaggag

SEQ ID NO: 6050 - DNA, 17 bp, Homo sapiens
ttcgagaagaaaggagc

SEQ ID NO: 6051 - DNA, 17 bp, Homo sapiens
tcgagaagaaaggagct

SEQ ID NO: 6052 - DNA, 17 bp, Homo sapiens
cgagaagaaaggagctg

SEQ ID NO: 6053 - DNA, 17 bp, Homo sapiens
gagaagaaaggagctgg

SEQ ID NO: 6054 - DNA, 17 bp, Homo sapiens
agaagaaaggagctggg

SEQ ID NO: 6055 - DNA, 17 bp, Homo sapiens
gaagaaaggagctggga

SEQ ID NO: 6056 - DNA, 17 bp, Homo sapiens
aagaaaggagctgggac

SEQ ID NO: 6057 - DNA, 17 bp, Homo sapiens
agaaaggagctgggact

SEQ ID NO: 6058 - DNA, 17 bp, Homo sapiens
gaaaggagctgggactg

SEQ ID NO: 6059 - DNA, 17 bp, Homo sapiens
aaaggagctgggactga

SEQ ID NO: 6060 - DNA, 17 bp, Homo sapiens
aaggagctgggactgaa

SEQ ID NO: 6061 - DNA, 17 bp, Homo sapiens
aggagctgggactgaag

SEQ ID NO: 6062 - DNA, 17 bp, Homo sapiens
ggagctgggactgaagg

SEQ ID NO: 6063 - DNA, 17 bp, Homo sapiens
gagctgggactgaaggg

SEQ ID NO: 6064 - DNA, 17 bp, Homo sapiens
agctgggactgaagggt

SEQ ID NO: 6065 - DNA, 17 bp, Homo sapiens
gctgggactgaagggtc

SEQ ID NO: 6066 - DNA, 17 bp, Homo sapiens
ctgggactgaagggtcc

SEQ ID NO: 6067 - DNA, 17 bp, Homo sapiens
tgggactgaagggtcct

SEQ ID NO: 6068 - DNA, 17 bp, Homo sapiens
gggactgaagggtcctc

SEQ ID NO: 6069 - DNA, 17 bp, Homo sapiens
ggactgaagggtcctct

SEQ ID NO: 6070 - DNA, 17 bp, Homo sapiens
gactgaagggtcctctg

SEQ ID NO: 6071 - DNA, 17 bp, Homo sapiens
actgaagggtcctctgc

SEQ ID NO: 6072 - DNA, 17 bp, Homo sapiens
ctgaagggtcctctgcc

SEQ ID NO: 6073 - DNA, 17 bp, Homo sapiens
tgaagggtcctctgccc

SEQ ID NO: 6074 - DNA, 17 bp, Homo sapiens
gaagggtcctctgccct

SEQ ID NO: 6075 - DNA, 17 bp, Homo sapiens
aagggtcctctgccctg

SEQ ID NO: 6076 - DNA, 17 bp, Homo sapiens
agggtcctctgccctgc

SEQ ID NO: 6077 - DNA, 17 bp, Homo sapiens
gggtcctctgccctgcg

SEQ ID NO: 6078 - DNA, 17 bp, Homo sapiens
ggtcctctgccctgcgg

SEQ ID NO: 6079 - DNA, 17 bp, Homo sapiens
gtcctctgccctgcgga

SEQ ID NO: 6080 - DNA, 17 bp, Homo sapiens
tcctctgccctgcggac

SEQ ID NO: 6081 - DNA, 17 bp, Homo sapiens
cctctgccctgcggacc

SEQ ID NO: 6082 - DNA, 17 bp, Homo sapiens
ctctgccctgcggacct

SEQ ID NO: 6083 - DNA, 17 bp, Homo sapiens
tctgccctgcggacctg

SEQ ID NO: 6084 - DNA, 17 bp, Homo sapiens
ctgccctgcggacctgt

SEQ ID NO: 6085 - DNA, 17 bp, Homo sapiens
tgccctgcggacctgtg

SEQ ID NO: 6086 - DNA, 17 bp, Homo sapiens
gccctgcggacctgtga

SEQ ID NO: 6087 - DNA, 17 bp, Homo sapiens
ccctgcggacctgtgag

SEQ ID NO: 6088 - DNA, 17 bp, Homo sapiens
cctgcggacctgtgagc

SEQ ID NO: 6089 - DNA, 17 bp, Homo sapiens
ctgcggacctgtgagca

SEQ ID NO: 6090 - DNA, 17 bp, Homo sapiens
tgcggacctgtgagcag

SEQ ID NO: 6091 - DNA, 17 bp, Homo sapiens
gcggacctgtgagcagc

SEQ ID NO: 6092 - DNA, 17 bp, Homo sapiens
cggacctgtgagcagcc

SEQ ID NO: 6093 - DNA, 17 bp, Homo sapiens
ggacctgtgagcagccc

SEQ ID NO: 6094 - DNA, 17 bp, Homo sapiens
gacctgtgagcagcccc

SEQ ID NO: 6095 - DNA, 17 bp, Homo sapiens
acctgtgagcagcccct

SEQ ID NO: 6096 - DNA, 17 bp, Homo sapiens
cctgtgagcagcccctc

SEQ ID NO: 6097 - DNA, 17 bp, Homo sapiens
ctgtgagcagcccctcc

SEQ ID NO: 6098 - DNA, 17 bp, Homo sapiens
tgtgagcagcccctcca

SEQ ID NO: 6099 - DNA, 17 bp, Homo sapiens
gtgagcagcccctccag

SEQ ID NO: 6100 - DNA, 17 bp, Homo sapiens
tgagcagcccctccagt

SEQ ID NO: 6101 - DNA, 17 bp, Homo sapiens
gagcagcccctccagtg

SEQ ID NO: 6102 - DNA, 17 bp, Homo sapiens
agcagcccctccagtgt

SEQ ID NO: 6103 - DNA, 17 bp, Homo sapiens
gcagcccctccagtgtg

SEQ ID NO: 6104 - DNA, 17 bp, Homo sapiens
cagcccctccagtgtga

SEQ ID NO: 6105 - DNA, 17 bp, Homo sapiens
agcccctccagtgtgag

SEQ ID NO: 6106 - DNA, 17 bp, Homo sapiens
gcccctccagtgtgaga

SEQ ID NO: 6107 - DNA, 17 bp, Homo sapiens
cccctccagtgtgagat

SEQ ID NO: 6108 - DNA, 17 bp, Homo sapiens
ccctccagtgtgagatt

SEQ ID NO: 6109 - DNA, 17 bp, Homo sapiens
cctccagtgtgagattt

SEQ ID NO: 6110 - DNA, 17 bp, Homo sapiens
ctccagtgtgagatttt

SEQ ID NO: 6111 - DNA, 17 bp, Homo sapiens
tccagtgtgagattttc

SEQ ID NO: 6112 - DNA, 17 bp, Homo sapiens
ccagtgtgagattttcc

SEQ ID NO: 6113 - DNA, 17 bp, Homo sapiens
cagtgtgagattttcca

SEQ ID NO: 6114 - DNA, 17 bp, Homo sapiens
agtgtgagattttccac

SEQ ID NO: 6115 - DNA, 17 bp, Homo sapiens
gtgtgagattttccacc

SEQ ID NO: 6116 - DNA, 17 bp, Homo sapiens
tgtgagattttccacca

SEQ ID NO: 6117 - DNA, 17 bp, Homo sapiens
gtgagattttccaccag

SEQ ID NO: 6118 - DNA, 17 bp, Homo sapiens
tgagattttccaccagt

SEQ ID NO: 6119 - DNA, 17 bp, Homo sapiens
gagattttccaccagtt

SEQ ID NO: 6120 - DNA, 17 bp, Homo sapiens
agattttccaccagttg

SEQ ID NO: 6121 - DNA, 17 bp, Homo sapiens
gattttccaccagttgg

SEQ ID NO: 6122 - DNA, 17 bp, Homo sapiens
attttccaccagttggg

SEQ ID NO: 6123 - DNA, 17 bp, Homo sapiens
ttttccaccagttggga

SEQ ID NO: 6124 - DNA, 17 bp, Homo sapiens
tttccaccagttgggat

SEQ ID NO: 6125 - DNA, 17 bp, Homo sapiens
ttccaccagttgggatg

SEQ ID NO: 6126 - DNA, 17 bp, Homo sapiens
tccaccagttgggatgg

SEQ ID NO: 6127 - DNA, 17 bp, Homo sapiens
ccaccagttgggatggg

SEQ ID NO: 6128 - DNA, 17 bp, Homo sapiens
caccagttgggatggga

SEQ ID NO: 6129 - DNA, 17 bp, Homo sapiens
accagttgggatgggac

SEQ ID NO: 6130 - DNA, 17 bp, Homo sapiens
ccagttgggatgggacc

SEQ ID NO: 6131 - DNA, 17 bp, Homo sapiens
cagttgggatgggaccc

SEQ ID NO: 6132 - DNA, 17 bp, Homo sapiens
agttgggatgggaccct

SEQ ID NO: 6133 - DNA, 17 bp, Homo sapiens
gttgggatgggaccctg

SEQ ID NO: 6134 - DNA, 17 bp, Homo sapiens
ttgggatgggaccctgt

SEQ ID NO: 6135 - DNA, 17 bp, Homo sapiens
tgggatgggaccctgtg

SEQ ID NO: 6136 - DNA, 17 bp, Homo sapiens
gggatgggaccctgtgc

SEQ ID NO: 6137 - DNA, 17 bp, Homo sapiens
ggatgggaccctgtgcg

SEQ ID NO: 6138 - DNA, 17 bp, Homo sapiens
gatgggaccctgtgcgg

SEQ ID NO: 6139 - DNA, 17 bp, Homo sapiens
atgggaccctgtgcggt

SEQ ID NO: 6140 - DNA, 17 bp, Homo sapiens
tgggaccctgtgcggta

SEQ ID NO: 6141 - DNA, 17 bp, Homo sapiens
gggaccctgtgcggtac

SEQ ID NO: 6142 - DNA, 17 bp, Homo sapiens
ggaccctgtgcggtacg

SEQ ID NO: 6143 - DNA, 17 bp, Homo sapiens
gaccctgtgcggtacga

SEQ ID NO: 6144 - DNA, 17 bp, Homo sapiens
accctgtgcggtacgac

SEQ ID NO: 6145 - DNA, 17 bp, Homo sapiens
ccctgtgcggtacgacc

SEQ ID NO: 6146 - DNA, 17 bp, Homo sapiens
cctgtgcggtacgacct

SEQ ID NO: 6147 - DNA, 17 bp, Homo sapiens
ctgtgcggtacgacctc

SEQ ID NO: 6148 - DNA, 17 bp, Homo sapiens
tgtgcggtacgacctca

SEQ ID NO: 6149 - DNA, 17 bp, Homo sapiens
gtgcggtacgacctcac

SEQ ID NO: 6150 - DNA, 17 bp, Homo sapiens
tgcggtacgacctcacg

SEQ ID NO: 6151 - DNA, 17 bp, Homo sapiens
gcggtacgacctcacgg

SEQ ID NO: 6152 - DNA, 17 bp, Homo sapiens
cggtacgacctcacggg

SEQ ID NO: 6153 - DNA, 17 bp, Homo sapiens
ggtacgacctcacgggc

SEQ ID NO: 6154 - DNA, 17 bp, Homo sapiens
gtacgacctcacgggct

SEQ ID NO: 6155 - DNA, 17 bp, Homo sapiens
tacgacctcacgggctg

SEQ ID NO: 6156 - DNA, 17 bp, Homo sapiens
acgacctcacgggctgg

SEQ ID NO: 6157 - DNA, 17 bp, Homo sapiens
cgacctcacgggctggc

SEQ ID NO: 6158 - DNA, 17 bp, Homo sapiens
gacctcacgggctggct

SEQ ID NO: 6159 - DNA, 17 bp, Homo sapiens
acctcacgggctggctc

SEQ ID NO: 6160 - DNA, 17 bp, Homo sapiens
cctcacgggctggctcc

SEQ ID NO: 6161 - DNA, 17 bp, Homo sapiens
ctcacgggctggctcca

SEQ ID NO: 6162 - DNA, 17 bp, Homo sapiens
tcacgggctggctccac

SEQ ID NO: 6163 - DNA, 17 bp, Homo sapiens
cacgggctggctccaca

SEQ ID NO: 6164 - DNA, 17 bp, Homo sapiens
acgggctggctccacag

SEQ ID NO: 6165 - DNA, 17 bp, Homo sapiens
cgggctggctccacaga

SEQ ID NO: 6166 - DNA, 17 bp, Homo sapiens
gggctggctccacagag

SEQ ID NO: 6167 - DNA, 17 bp, Homo sapiens
ggctggctccacagagc

SEQ ID NO: 6168 - DNA, 17 bp, Homo sapiens
gctggctccacagagcc

SEQ ID NO: 6169 - DNA, 17 bp, Homo sapiens
ctggctccacagagcca

SEQ ID NO: 6170 - DNA, 17 bp, Homo sapiens
tggctccacagagccaa

SEQ ID NO: 6171 - DNA, 17 bp, Homo sapiens
ggctccacagagccaag

SEQ ID NO: 6172 - DNA, 17 bp, Homo sapiens
gctccacagagccaagc

SEQ ID NO: 6173 - DNA, 17 bp, Homo sapiens
ctccacagagccaagcc

SEQ ID NO: 6174 - DNA, 17 bp, Homo sapiens
tccacagagccaagccc

SEQ ID NO: 6175 - DNA, 17 bp, Homo sapiens
ccacagagccaagccca

SEQ ID NO: 6176 - DNA, 17 bp, Homo sapiens
cacagagccaagcccaa

SEQ ID NO: 6177 - DNA, 17 bp, Homo sapiens
acagagccaagcccaac

SEQ ID NO: 6178 - DNA, 17 bp, Homo sapiens
cagagccaagcccaacc

SEQ ID NO: 6179 - DNA, 17 bp, Homo sapiens
agagccaagcccaacct

SEQ ID NO: 6180 - DNA, 17 bp, Homo sapiens
gagccaagcccaacctc

SEQ ID NO: 6181 - DNA, 17 bp, Homo sapiens
agccaagcccaacctct

SEQ ID NO: 6182 - DNA, 17 bp, Homo sapiens
gccaagcccaacctctc

SEQ ID NO: 6183 - DNA, 17 bp, Homo sapiens
ccaagcccaacctctcg

SEQ ID NO: 6184 - DNA, 17 bp, Homo sapiens
caagcccaacctctcgg

SEQ ID NO: 6185 - DNA, 17 bp, Homo sapiens
aagcccaacctctcggc

SEQ ID NO: 6186 - DNA, 17 bp, Homo sapiens
agcccaacctctcggcc

SEQ ID NO: 6187 - DNA, 17 bp, Homo sapiens
gcccaacctctcggccc

SEQ ID NO: 6188 - DNA, 17 bp, Homo sapiens
cccaacctctcggccct

SEQ ID NO: 6189 - DNA, 17 bp, Homo sapiens
ccaacctctcggccctg

SEQ ID NO: 6190 - DNA, 17 bp, Homo sapiens
caacctctcggccctgg

SEQ ID NO: 6191 - DNA, 17 bp, Homo sapiens
aacctctcggccctgga

SEQ ID NO: 6192 - DNA, 17 bp, Homo sapiens
acctctcggccctggat

SEQ ID NO: 6193 - DNA, 17 bp, Homo sapiens
cctctcggccctggatg

SEQ ID NO: 6194 - DNA, 17 bp, Homo sapiens
ctctcggccctggatgc

SEQ ID NO: 6195 - DNA, 17 bp, Homo sapiens
tctcggccctggatgca

SEQ ID NO: 6196 - DNA, 17 bp, Homo sapiens
ctcggccctggatgcac

SEQ ID NO: 6197 - DNA, 17 bp, Homo sapiens
tcggccctggatgcacc

SEQ ID NO: 6198 - DNA, 17 bp, Homo sapiens
cggccctggatgcaccc

SEQ ID NO: 6199 - DNA, 17 bp, Homo sapiens
ggccctggatgcacccc

SEQ ID NO: 6200 - DNA, 17 bp, Homo sapiens
gccctggatgcacccca

SEQ ID NO: 6201 - DNA, 17 bp, Homo sapiens
ccctggatgcaccccag

SEQ ID NO: 6202 - DNA, 17 bp, Homo sapiens
cctggatgcaccccagg

SEQ ID NO: 6203 - DNA, 17 bp, Homo sapiens
ctggatgcaccccaggt

SEQ ID NO: 6204 - DNA, 17 bp, Homo sapiens
tggatgcaccccaggtc

SEQ ID NO: 6205 - DNA, 17 bp, Homo sapiens
ggatgcaccccaggtcc

SEQ ID NO: 6206 - DNA, 17 bp, Homo sapiens
gatgcaccccaggtcct

SEQ ID NO: 6207 - DNA, 17 bp, Homo sapiens
atgcaccccaggtcctg

SEQ ID NO: 6208 - DNA, 17 bp, Homo sapiens
tgcaccccaggtcctgc

SEQ ID NO: 6209 - DNA, 17 bp, Homo sapiens
gcaccccaggtcctgca

SEQ ID NO: 6210 - DNA, 17 bp, Homo sapiens
caccccaggtcctgcaa

SEQ ID NO: 6211 - DNA, 17 bp, Homo sapiens
accccaggtcctgcaac

SEQ ID NO: 6212 - DNA, 17 bp, Homo sapiens
ccccaggtcctgcaaca

SEQ ID NO: 6213 - DNA, 17 bp, Homo sapiens
cccaggtcctgcaacag

SEQ ID NO: 6214 - DNA, 17 bp, Homo sapiens
ccaggtcctgcaacagt

SEQ ID NO: 6215 - DNA, 17 bp, Homo sapiens
caggtcctgcaacagtc

SEQ ID NO: 6216 - DNA, 17 bp, Homo sapiens
aggtcctgcaacagtca

SEQ ID NO: 6217 - DNA, 17 bp, Homo sapiens
ggtcctgcaacagtcaa

SEQ ID NO: 6218 - DNA, 17 bp, Homo sapiens
gtcctgcaacagtcaaa

SEQ ID NO: 6219 - DNA, 17 bp, Homo sapiens
tcctgcaacagtcaaaa

SEQ ID NO: 6220 - DNA, 17 bp, Homo sapiens
cctgcaacagtcaaaaa

SEQ ID NO: 6221 - DNA, 17 bp, Homo sapiens
ctgcaacagtcaaaaag

SEQ ID NO: 6222 - DNA, 17 bp, Homo sapiens
tgcaacagtcaaaaaga

SEQ ID NO: 6223 - DNA, 17 bp, Homo sapiens
gcaacagtcaaaaagag

SEQ ID NO: 6224 - DNA, 17 bp, Homo sapiens
caacagtcaaaaagaga

SEQ ID NO: 6225 - DNA, 17 bp, Homo sapiens
aacagtcaaaaagagag

SEQ ID NO: 6226 - DNA, 17 bp, Homo sapiens
acagtcaaaaagagagg

SEQ ID NO: 6227 - DNA, 17 bp, Homo sapiens
cagtcaaaaagagagga

SEQ ID NO: 6228 - DNA, 17 bp, Homo sapiens
agtcaaaaagagaggag

SEQ ID NO: 6229 - DNA, 17 bp, Homo sapiens
gtcaaaaagagaggagc

SEQ ID NO: 6230 - DNA, 17 bp, Homo sapiens
tcaaaaagagaggagct

SEQ ID NO: 6231 - DNA, 17 bp, Homo sapiens
caaaaagagaggagctg

SEQ ID NO: 6232 - DNA, 17 bp, Homo sapiens
aaaaagagaggagctgc

SEQ ID NO: 6233 - DNA, 17 bp, Homo sapiens
aaaagagaggagctgcg

SEQ ID NO: 6234 - DNA, 17 bp, Homo sapiens
aaagagaggagctgcgg

SEQ ID NO: 6235 - DNA, 17 bp, Homo sapiens
aagagaggagctgcgga

SEQ ID NO: 6236 - DNA, 17 bp, Homo sapiens
agagaggagctgcggag

SEQ ID NO: 6237 - DNA, 17 bp, Homo sapiens
gagaggagctgcggagt

SEQ ID NO: 6238 - DNA, 17 bp, Homo sapiens
agaggagctgcggagtc

SEQ ID NO: 6239 - DNA, 17 bp, Homo sapiens
gaggagctgcggagtct

SEQ ID NO: 6240 - DNA, 17 bp, Homo sapiens
aggagctgcggagtcta

SEQ ID NO: 6241 - DNA, 17 bp, Homo sapiens
ggagctgcggagtctat

SEQ ID NO: 6242 - DNA, 17 bp, Homo sapiens
gagctgcggagtctatt

SEQ ID NO: 6243 - DNA, 17 bp, Homo sapiens
agctgcggagtctattc

SEQ ID NO: 6244 - DNA, 17 bp, Homo sapiens
gctgcggagtctattcc

SEQ ID NO: 6245 - DNA, 17 bp, Homo sapiens
ctgcggagtctattcca

SEQ ID NO: 6246 - DNA, 17 bp, Homo sapiens
tgcggagtctattccag

SEQ ID NO: 6247 - DNA, 17 bp, Homo sapiens
gcggagtctattccagg

SEQ ID NO: 6248 - DNA, 17 bp, Homo sapiens
cggagtctattccaggc

SEQ ID NO: 6249 - DNA, 17 bp, Homo sapiens
ggagtctattccaggcc

SEQ ID NO: 6250 - DNA, 17 bp, Homo sapiens
gagtctattccaggccc

SEQ ID NO: 6251 - DNA, 17 bp, Homo sapiens
agtctattccaggcccg

SEQ ID NO: 6252 - DNA, 17 bp, Homo sapiens
gtctattccaggcccgg

SEQ ID NO: 6253 - DNA, 17 bp, Homo sapiens
tctattccaggcccggg

SEQ ID NO: 6254 - DNA, 17 bp, Homo sapiens
ctattccaggcccgggc

SEQ ID NO: 6255 - DNA, 17 bp, Homo sapiens
tattccaggcccgggcc

SEQ ID NO: 6256 - DNA, 17 bp, Homo sapiens
attccaggcccgggcca

SEQ ID NO: 6257 - DNA, 17 bp, Homo sapiens
ttccaggcccgggccaa

SEQ ID NO: 6258 - DNA, 17 bp, Homo sapiens
tccaggcccgggccaag

SEQ ID NO: 6259 - DNA, 17 bp, Homo sapiens
ccaggcccgggccaagc

SEQ ID NO: 6260 - DNA, 17 bp, Homo sapiens
caggcccgggccaagct

SEQ ID NO: 6261 - DNA, 17 bp, Homo sapiens
aggcccgggccaagctg

SEQ ID NO: 6262 - DNA, 17 bp, Homo sapiens
ggcccgggccaagctgc

SEQ ID NO: 6263 - DNA, 17 bp, Homo sapiens
gcccgggccaagctgcc

SEQ ID NO: 6264 - DNA, 17 bp, Homo sapiens
cccgggccaagctgcct

SEQ ID NO: 6265 - DNA, 17 bp, Homo sapiens
ccgggccaagctgcctc

SEQ ID NO: 6266 - DNA, 17 bp, Homo sapiens
cgggccaagctgcctcc

SEQ ID NO: 6267 - DNA, 17 bp, Homo sapiens
gggccaagctgcctcct

SEQ ID NO: 6268 - DNA, 17 bp, Homo sapiens
ggccaagctgcctcctg

SEQ ID NO: 6269 - DNA, 17 bp, Homo sapiens
gccaagctgcctcctgt

SEQ ID NO: 6270 - DNA, 17 bp, Homo sapiens
ccaagctgcctcctgtg

SEQ ID NO: 6271 - DNA, 17 bp, Homo sapiens
caagctgcctcctgtgt

SEQ ID NO: 6272 - DNA, 17 bp, Homo sapiens
aagctgcctcctgtgtg

SEQ ID NO: 6273 - DNA, 17 bp, Homo sapiens
agctgcctcctgtgtgc

SEQ ID NO: 6274 - DNA, 17 bp, Homo sapiens
gctgcctcctgtgtgcc

SEQ ID NO: 6275 - DNA, 17 bp, Homo sapiens
ctgcctcctgtgtgccg

SEQ ID NO: 6276 - DNA, 17 bp, Homo sapiens
tgcctcctgtgtgccgg

SEQ ID NO: 6277 - DNA, 17 bp, Homo sapiens
gcctcctgtgtgccggg

SEQ ID NO: 6278 - DNA, 17 bp, Homo sapiens
cctcctgtgtgccgggc

SEQ ID NO: 6279 - DNA, 17 bp, Homo sapiens
ctcctgtgtgccgggct

SEQ ID NO: 6280 - DNA, 17 bp, Homo sapiens
tcctgtgtgccgggctg

SEQ ID NO: 6281 - DNA, 17 bp, Homo sapiens
cctgtgtgccgggctgt

SEQ ID NO: 6282 - DNA, 17 bp, Homo sapiens
ctgtgtgccgggctgtg

SEQ ID NO: 6283 - DNA, 17 bp, Homo sapiens
tgtgtgccgggctgtgg

SEQ ID NO: 6284 - DNA, 17 bp, Homo sapiens
gtgtgccgggctgtggc

SEQ ID NO: 6285 - DNA, 17 bp, Homo sapiens
tgtgccgggctgtggca

SEQ ID NO: 6286 - DNA, 17 bp, Homo sapiens
gtgccgggctgtggcag

SEQ ID NO: 6287 - DNA, 17 bp, Homo sapiens
tgccgggctgtggcagg

SEQ ID NO: 6288 - DNA, 17 bp, Homo sapiens
gccgggctgtggcaggc

SEQ ID NO: 6289 - DNA, 17 bp, Homo sapiens
ccgggctgtggcaggcc

SEQ ID NO: 6290 - DNA, 17 bp, Homo sapiens
cgggctgtggcaggcct

SEQ ID NO: 6291 - DNA, 17 bp, Homo sapiens
gggctgtggcaggcctg

SEQ ID NO: 6292 - DNA, 17 bp, Homo sapiens
ggctgtggcaggcctgg

SEQ ID NO: 6293 - DNA, 17 bp, Homo sapiens
gctgtggcaggcctgga

SEQ ID NO: 6294 - DNA, 17 bp, Homo sapiens
ctgtggcaggcctggag

SEQ ID NO: 6295 - DNA, 17 bp, Homo sapiens
tgtggcaggcctggagg

SEQ ID NO: 6296 - DNA, 17 bp, Homo sapiens
gtggcaggcctggaggg

SEQ ID NO: 6297 - DNA, 17 bp, Homo sapiens
tggcaggcctggagggc

SEQ ID NO: 6298 - DNA, 17 bp, Homo sapiens
ggcaggcctggagggca

SEQ ID NO: 6299 - DNA, 17 bp, Homo sapiens
gcaggcctggagggcac

SEQ ID NO: 6300 - DNA, 17 bp, Homo sapiens
caggcctggagggcacc

SEQ ID NO: 6301 - DNA, 17 bp, Homo sapiens
aggcctggagggcacct

SEQ ID NO: 6302 - DNA, 17 bp, Homo sapiens
ggcctggagggcacctc

SEQ ID NO: 6303 - DNA, 17 bp, Homo sapiens
gcctggagggcacctcc

SEQ ID NO: 6304 - DNA, 17 bp, Homo sapiens
cctggagggcacctccc

SEQ ID NO: 6305 - DNA, 17 bp, Homo sapiens
ctggagggcacctccca

SEQ ID NO: 6306 - DNA, 17 bp, Homo sapiens
tggagggcacctcccag

SEQ ID NO: 6307 - DNA, 17 bp, Homo sapiens
ggagggcacctcccagc

SEQ ID NO: 6308 - DNA, 17 bp, Homo sapiens
gagggcacctcccagca

SEQ ID NO: 6309 - DNA, 17 bp, Homo sapiens
agggcacctcccagcag

SEQ ID NO: 6310 - DNA, 17 bp, Homo sapiens
gggcacctcccagcagg

SEQ ID NO: 6311 - DNA, 17 bp, Homo sapiens
ggcacctcccagcaggc

SEQ ID NO: 6312 - DNA, 17 bp, Homo sapiens
gcacctcccagcaggcc

SEQ ID NO: 6313 - DNA, 17 bp, Homo sapiens
cacctcccagcaggccc

SEQ ID NO: 6314 - DNA, 17 bp, Homo sapiens
acctcccagcaggccct

SEQ ID NO: 6315 - DNA, 17 bp, Homo sapiens
cctcccagcaggccctg

SEQ ID NO: 6316 - DNA, 17 bp, Homo sapiens
ctcccagcaggccctgc

SEQ ID NO: 6317 - DNA, 17 bp, Homo sapiens
tcccagcaggccctgca

SEQ ID NO: 6318 - DNA, 17 bp, Homo sapiens
cccagcaggccctgcag

SEQ ID NO: 6319 - DNA, 17 bp, Homo sapiens
ccagcaggccctgcaga

SEQ ID NO: 6320 - DNA, 17 bp, Homo sapiens
cagcaggccctgcagag

SEQ ID NO: 6321 - DNA, 17 bp, Homo sapiens
agcaggccctgcagagg

SEQ ID NO: 6322 - DNA, 17 bp, Homo sapiens
gcaggccctgcagagga

SEQ ID NO: 6323 - DNA, 17 bp, Homo sapiens
caggccctgcagaggag

SEQ ID NO: 6324 - DNA, 17 bp, Homo sapiens
aggccctgcagaggagc

SEQ ID NO: 6325 - DNA, 17 bp, Homo sapiens
ggccctgcagaggagcc

SEQ ID NO: 6326 - DNA, 17 bp, Homo sapiens
gccctgcagaggagccg

SEQ ID NO: 6327 - DNA, 17 bp, Homo sapiens
ccctgcagaggagccgc

SEQ ID NO: 6328 - DNA, 17 bp, Homo sapiens
cctgcagaggagccgca

SEQ ID NO: 6329 - DNA, 17 bp, Homo sapiens
ctgcagaggagccgcat

SEQ ID NO: 6330 - DNA, 17 bp, Homo sapiens
tgcagaggagccgcatg

SEQ ID NO: 6331 - DNA, 17 bp, Homo sapiens
gcagaggagccgcatgg

SEQ ID NO: 6332 - DNA, 17 bp, Homo sapiens
cagaggagccgcatggt

SEQ ID NO: 6333 - DNA, 17 bp, Homo sapiens
agaggagccgcatggtg

SEQ ID NO: 6334 - DNA, 17 bp, Homo sapiens
gaggagccgcatggtga

SEQ ID NO: 6335 - DNA, 17 bp, Homo sapiens
aggagccgcatggtgag

SEQ ID NO: 6336 - DNA, 17 bp, Homo sapiens
ggagccgcatggtgagg

SEQ ID NO: 6337 - DNA, 17 bp, Homo sapiens
gagccgcatggtgagga

SEQ ID NO: 6338 - DNA, 17 bp, Homo sapiens
agccgcatggtgaggag

SEQ ID NO: 6339 - DNA, 17 bp, Homo sapiens
gccgcatggtgaggagg

SEQ ID NO: 6340 - DNA, 17 bp, Homo sapiens
ccgcatggtgaggagga

SEQ ID NO: 6341 - DNA, 17 bp, Homo sapiens
cgcatggtgaggaggac

SEQ ID NO: 6342 - DNA, 17 bp, Homo sapiens
gcatggtgaggaggacc

SEQ ID NO: 6343 - DNA, 17 bp, Homo sapiens
catggtgaggaggacct

SEQ ID NO: 6344 - DNA, 17 bp, Homo sapiens
atggtgaggaggacctt

SEQ ID NO: 6345 - DNA, 17 bp, Homo sapiens
tggtgaggaggaccttt

SEQ ID NO: 6346 - DNA, 17 bp, Homo sapiens
ggtgaggaggacctttg

SEQ ID NO: 6347 - DNA, 17 bp, Homo sapiens
gtgaggaggacctttgc

SEQ ID NO: 6348 - DNA, 17 bp, Homo sapiens
tgaggaggacctttgcc

SEQ ID NO: 6349 - DNA, 17 bp, Homo sapiens
gaggaggacctttgcca

SEQ ID NO: 6350 - DNA, 17 bp, Homo sapiens
aggaggacctttgccag

SEQ ID NO: 6351 - DNA, 17 bp, Homo sapiens
ggaggacctttgccagc

SEQ ID NO: 6352 - DNA, 17 bp, Homo sapiens
gaggacctttgccagca

SEQ ID NO: 6353 - DNA, 17 bp, Homo sapiens
aggacctttgccagcag

SEQ ID NO: 6354 - DNA, 17 bp, Homo sapiens
ggacctttgccagcagc

SEQ ID NO: 6355 - DNA, 17 bp, Homo sapiens
gacctttgccagcagcc

SEQ ID NO: 6356 - DNA, 17 bp, Homo sapiens
acctttgccagcagcct

SEQ ID NO: 6357 - DNA, 17 bp, Homo sapiens
cctttgccagcagcctt

SEQ ID NO: 6358 - DNA, 17 bp, Homo sapiens
ctttgccagcagccttg

SEQ ID NO: 6359 - DNA, 17 bp, Homo sapiens
tttgccagcagccttgc

SEQ ID NO: 6360 - DNA, 17 bp, Homo sapiens
ttgccagcagccttgcc

SEQ ID NO: 6361 - DNA, 17 bp, Homo sapiens
tgccagcagccttgccg

SEQ ID NO: 6362 - DNA, 17 bp, Homo sapiens
gccagcagccttgccgc

SEQ ID NO: 6363 - DNA, 17 bp, Homo sapiens
ccagcagccttgccgcg

SEQ ID NO: 6364 - DNA, 17 bp, Homo sapiens
cagcagccttgccgcgg

SEQ ID NO: 6365 - DNA, 17 bp, Homo sapiens
agcagccttgccgcggt

SEQ ID NO: 6366 - DNA, 17 bp, Homo sapiens
gcagccttgccgcggtg

SEQ ID NO: 6367 - DNA, 17 bp, Homo sapiens
cagccttgccgcggtga

SEQ ID NO: 6368 - DNA, 17 bp, Homo sapiens
agccttgccgcggtgag

SEQ ID NO: 6369 - DNA, 17 bp, Homo sapiens
gccttgccgcggtgagg

SEQ ID NO: 6370 - DNA, 17 bp, Homo sapiens
ccttgccgcggtgagga

SEQ ID NO: 6371 - DNA, 17 bp, Homo sapiens
cttgccgcggtgaggag

SEQ ID NO: 6372 - DNA, 17 bp, Homo sapiens
ttgccgcggtgaggagg

SEQ ID NO: 6373 - DNA, 17 bp, Homo sapiens
tgccgcggtgaggagga

SEQ ID NO: 6374 - DNA, 17 bp, Homo sapiens
gccgcggtgaggaggaa

SEQ ID NO: 6375 - DNA, 17 bp, Homo sapiens
ccgcggtgaggaggaaa

SEQ ID NO: 6376 - DNA, 17 bp, Homo sapiens
cgcggtgaggaggaaag

SEQ ID NO: 6377 - DNA, 17 bp, Homo sapiens
gcggtgaggaggaaagc

SEQ ID NO: 6378 - DNA, 17 bp, Homo sapiens
cggtgaggaggaaagcc

SEQ ID NO: 6379 - DNA, 17 bp, Homo sapiens
ggtgaggaggaaagccc

SEQ ID NO: 6380 - DNA, 17 bp, Homo sapiens
gtgaggaggaaagcccc

SEQ ID NO: 6381 - DNA, 17 bp, Homo sapiens
tgaggaggaaagccccg

SEQ ID NO: 6382 - DNA, 17 bp, Homo sapiens
gaggaggaaagccccgt

SEQ ID NO: 6383 - DNA, 17 bp, Homo sapiens
aggaggaaagccccgtg

SEQ ID NO: 6384 - DNA, 17 bp, Homo sapiens
ggaggaaagccccgtgc

SEQ ID NO: 6385 - DNA, 17 bp, Homo sapiens
gaggaaagccccgtgct

SEQ ID NO: 6386 - DNA, 17 bp, Homo sapiens
aggaaagccccgtgctc

SEQ ID NO: 6387 - DNA, 17 bp, Homo sapiens
ggaaagccccgtgctcc

SEQ ID NO: 6388 - DNA, 17 bp, Homo sapiens
gaaagccccgtgctccc

SEQ ID NO: 6389 - DNA, 17 bp, Homo sapiens
aaagccccgtgctccca

SEQ ID NO: 6390 - DNA, 17 bp, Homo sapiens
aagccccgtgctcccag

SEQ ID NO: 6391 - DNA, 17 bp, Homo sapiens
agccccgtgctcccaga

SEQ ID NO: 6392 - DNA, 17 bp, Homo sapiens
gccccgtgctcccagat

SEQ ID NO: 6393 - DNA, 17 bp, Homo sapiens
ccccgtgctcccagatc

SEQ ID NO: 6394 - DNA, 17 bp, Homo sapiens
cccgtgctcccagatca

SEQ ID NO: 6395 - DNA, 17 bp, Homo sapiens
ccgtgctcccagatcaa

SEQ ID NO: 6396 - DNA, 17 bp, Homo sapiens
cgtgctcccagatcaag

SEQ ID NO: 6397 - DNA, 17 bp, Homo sapiens
gtgctcccagatcaagc

SEQ ID NO: 6398 - DNA, 17 bp, Homo sapiens
tgctcccagatcaagct

SEQ ID NO: 6399 - DNA, 17 bp, Homo sapiens
gctcccagatcaagctg

SEQ ID NO: 6400 - DNA, 17 bp, Homo sapiens
ctcccagatcaagctgc

SEQ ID NO: 6401 - DNA, 17 bp, Homo sapiens
tcccagatcaagctgca

SEQ ID NO: 6402 - DNA, 17 bp, Homo sapiens
cccagatcaagctgcag

SEQ ID NO: 6403 - DNA, 17 bp, Homo sapiens
ccagatcaagctgcaga

SEQ ID NO: 6404 - DNA, 17 bp, Homo sapiens
cagatcaagctgcagat

SEQ ID NO: 6405 - DNA, 17 bp, Homo sapiens
agatcaagctgcagatg

SEQ ID NO: 6406 - DNA, 17 bp, Homo sapiens
gatcaagctgcagatgg

SEQ ID NO: 6407 - DNA, 17 bp, Homo sapiens
atcaagctgcagatgga

SEQ ID NO: 6408 - DNA, 17 bp, Homo sapiens
tcaagctgcagatggat

SEQ ID NO: 6409 - DNA, 17 bp, Homo sapiens
caagctgcagatggatg

SEQ ID NO: 6410 - DNA, 17 bp, Homo sapiens
aagctgcagatggatgc

SEQ ID NO: 6411 - DNA, 17 bp, Homo sapiens
agctgcagatggatgcg

SEQ ID NO: 6412 - DNA, 17 bp, Homo sapiens
gctgcagatggatgcgc

SEQ ID NO: 6413 - DNA, 17 bp, Homo sapiens
ctgcagatggatgcgct

SEQ ID NO: 6414 - DNA, 17 bp, Homo sapiens
tgcagatggatgcgctg

SEQ ID NO: 6415 - DNA, 17 bp, Homo sapiens
gcagatggatgcgctga

SEQ ID NO: 6416 - DNA, 17 bp, Homo sapiens
cagatggatgcgctgac

SEQ ID NO: 6417 - DNA, 17 bp, Homo sapiens
agatggatgcgctgacc

SEQ ID NO: 6418 - DNA, 17 bp, Homo sapiens
gatggatgcgctgacca

SEQ ID NO: 6419 - DNA, 17 bp, Homo sapiens
atggatgcgctgaccag

SEQ ID NO: 6420 - DNA, 17 bp, Homo sapiens
tggatgcgctgaccagc

SEQ ID NO: 6421 - DNA, 17 bp, Homo sapiens
ggatgcgctgaccagca

SEQ ID NO: 6422 - DNA, 17 bp, Homo sapiens
gatgcgctgaccagcat

SEQ ID NO: 6423 - DNA, 17 bp, Homo sapiens
atgcgctgaccagcatg

SEQ ID NO: 6424 - DNA, 17 bp, Homo sapiens
tgcgctgaccagcatga

SEQ ID NO: 6425 - DNA, 17 bp, Homo sapiens
gcgctgaccagcatgat

SEQ ID NO: 6426 - DNA, 17 bp, Homo sapiens
cgctgaccagcatgatc

SEQ ID NO: 6427 - DNA, 17 bp, Homo sapiens
gctgaccagcatgatca

SEQ ID NO: 6428 - DNA, 17 bp, Homo sapiens
ctgaccagcatgatcaa

SEQ ID NO: 6429 - DNA, 17 bp, Homo sapiens
tgaccagcatgatcaaa

SEQ ID NO: 6430 - DNA, 17 bp, Homo sapiens
gaccagcatgatcaaaa

SEQ ID NO: 6431 - DNA, 17 bp, Homo sapiens
accagcatgatcaaaag

SEQ ID NO: 6432 - DNA, 17 bp, Homo sapiens
ccagcatgatcaaaagg

SEQ ID NO: 6433 - DNA, 17 bp, Homo sapiens
cagcatgatcaaaaggt

SEQ ID NO: 6434 - DNA, 17 bp, Homo sapiens
agcatgatcaaaaggtc

SEQ ID NO: 6435 - DNA, 17 bp, Homo sapiens
gcatgatcaaaaggtcc

SEQ ID NO: 6436 - DNA, 17 bp, Homo sapiens
catgatcaaaaggtccc

SEQ ID NO: 6437 - DNA, 17 bp, Homo sapiens
atgatcaaaaggtcccg

SEQ ID NO: 6438 - DNA, 17 bp, Homo sapiens
tgatcaaaaggtcccgg

SEQ ID NO: 6439 - DNA, 17 bp, Homo sapiens
gatcaaaaggtcccggc

SEQ ID NO: 6440 - DNA, 17 bp, Homo sapiens
atcaaaaggtcccggct

SEQ ID NO: 6441 - DNA, 17 bp, Homo sapiens
tcaaaaggtcccggctg

SEQ ID NO: 6442 - DNA, 17 bp, Homo sapiens
caaaaggtcccggctgc

SEQ ID NO: 6443 - DNA, 17 bp, Homo sapiens
aaaaggtcccggctgca

SEQ ID NO: 6444 - DNA, 17 bp, Homo sapiens
aaaggtcccggctgcac

SEQ ID NO: 6445 - DNA, 17 bp, Homo sapiens
aaggtcccggctgcact

SEQ ID NO: 6446 - DNA, 17 bp, Homo sapiens
aggtcccggctgcactt

SEQ ID NO: 6447 - DNA, 17 bp, Homo sapiens
ggtcccggctgcacttt

SEQ ID NO: 6448 - DNA, 17 bp, Homo sapiens
gtcccggctgcacttta

SEQ ID NO: 6449 - DNA, 17 bp, Homo sapiens
tcccggctgcactttat

SEQ ID NO: 6450 - DNA, 17 bp, Homo sapiens
cccggctgcactttatc

SEQ ID NO: 6451 - DNA, 17 bp, Homo sapiens
ccggctgcactttatcc

SEQ ID NO: 6452 - DNA, 17 bp, Homo sapiens
cggctgcactttatcca

SEQ ID NO: 6453 - DNA, 17 bp, Homo sapiens
ggctgcactttatccac

SEQ ID NO: 6454 - DNA, 17 bp, Homo sapiens
gctgcactttatccact

SEQ ID NO: 6455 - DNA, 17 bp, Homo sapiens
ctgcactttatccactg

SEQ ID NO: 6456 - DNA, 17 bp, Homo sapiens
tgcactttatccactgc

SEQ ID NO: 6457 - DNA, 17 bp, Homo sapiens
gcactttatccactgcc

SEQ ID NO: 6458 - DNA, 17 bp, Homo sapiens
cactttatccactgcct

SEQ ID NO: 6459 - DNA, 17 bp, Homo sapiens
actttatccactgcctg

SEQ ID NO: 6460 - DNA, 17 bp, Homo sapiens
ctttatccactgcctgg

SEQ ID NO: 6461 - DNA, 17 bp, Homo sapiens
tttatccactgcctggt

SEQ ID NO: 6462 - DNA, 17 bp, Homo sapiens
ttatccactgcctggta

SEQ ID NO: 6463 - DNA, 17 bp, Homo sapiens
tatccactgcctggtac

SEQ ID NO: 6464 - DNA, 17 bp, Homo sapiens
atccactgcctggtacc

SEQ ID NO: 6465 - DNA, 17 bp, Homo sapiens
tccactgcctggtacca

SEQ ID NO: 6466 - DNA, 17 bp, Homo sapiens
ccactgcctggtaccaa

SEQ ID NO: 6467 - DNA, 17 bp, Homo sapiens
cactgcctggtaccaaa

SEQ ID NO: 6468 - DNA, 17 bp, Homo sapiens
actgcctggtaccaaac

SEQ ID NO: 6469 - DNA, 17 bp, Homo sapiens
ctgcctggtaccaaacc

SEQ ID NO: 6470 - DNA, 17 bp, Homo sapiens
tgcctggtaccaaaccc

SEQ ID NO: 6471 - DNA, 17 bp, Homo sapiens
gcctggtaccaaaccct

SEQ ID NO: 6472 - DNA, 17 bp, Homo sapiens
cctggtaccaaaccctg

SEQ ID NO: 6473 - DNA, 17 bp, Homo sapiens
ctggtaccaaaccctgt

SEQ ID NO: 6474 - DNA, 17 bp, Homo sapiens
tggtaccaaaccctgtg

SEQ ID NO: 6475 - DNA, 17 bp, Homo sapiens
ggtaccaaaccctgtgg

SEQ ID NO: 6476 - DNA, 17 bp, Homo sapiens
gtaccaaaccctgtggt

SEQ ID NO: 6477 - DNA, 17 bp, Homo sapiens
taccaaaccctgtggtg

SEQ ID NO: 6478 - DNA, 17 bp, Homo sapiens
accaaaccctgtggtgg

SEQ ID NO: 6479 - DNA, 17 bp, Homo sapiens
ccaaaccctgtggtgga

SEQ ID NO: 6480 - DNA, 17 bp, Homo sapiens
caaaccctgtggtggaa

SEQ ID NO: 6481 - DNA, 17 bp, Homo sapiens
aaaccctgtggtggaaa

SEQ ID NO: 6482 - DNA, 17 bp, Homo sapiens
aaccctgtggtggaaag

SEQ ID NO: 6483 - DNA, 17 bp, Homo sapiens
accctgtggtggaaagc

SEQ ID NO: 6484 - DNA, 17 bp, Homo sapiens
ccctgtggtggaaagca

SEQ ID NO: 6485 - DNA, 17 bp, Homo sapiens
cctgtggtggaaagcag

SEQ ID NO: 6486 - DNA, 17 bp, Homo sapiens
ctgtggtggaaagcagg

SEQ ID NO: 6487 - DNA, 17 bp, Homo sapiens
tgtggtggaaagcagga

SEQ ID NO: 6488 - DNA, 17 bp, Homo sapiens
gtggtggaaagcaggag

SEQ ID NO: 6489 - DNA, 17 bp, Homo sapiens
tggtggaaagcaggagt

SEQ ID NO: 6490 - DNA, 17 bp, Homo sapiens
ggtggaaagcaggagtg

SEQ ID NO: 6491 - DNA, 17 bp, Homo sapiens
gtggaaagcaggagtgg

SEQ ID NO: 6492 - DNA, 17 bp, Homo sapiens
tggaaagcaggagtggg

SEQ ID NO: 6493 - DNA, 17 bp, Homo sapiens
ggaaagcaggagtgggc

SEQ ID NO: 6494 - DNA, 17 bp, Homo sapiens
gaaagcaggagtgggca

SEQ ID NO: 6495 - DNA, 17 bp, Homo sapiens
aaagcaggagtgggcag

SEQ ID NO: 6496 - DNA, 17 bp, Homo sapiens
aagcaggagtgggcagg

SEQ ID NO: 6497 - DNA, 17 bp, Homo sapiens
agcaggagtgggcagga

SEQ ID NO: 6498 - DNA, 17 bp, Homo sapiens
gcaggagtgggcaggaa

SEQ ID NO: 6499 - DNA, 17 bp, Homo sapiens
caggagtgggcaggaat

SEQ ID NO: 6500 - DNA, 17 bp, Homo sapiens
aggagtgggcaggaatc

SEQ ID NO: 6501 - DNA, 17 bp, Homo sapiens
ggagtgggcaggaatct

SEQ ID NO: 6502 - DNA, 17 bp, Homo sapiens
gagtgggcaggaatctc

SEQ ID NO: 6503 - DNA, 17 bp, Homo sapiens
agtgggcaggaatctcc

SEQ ID NO: 6504 - DNA, 17 bp, Homo sapiens
gtgggcaggaatctcca

SEQ ID NO: 6505 - DNA, 17 bp, Homo sapiens
tgggcaggaatctccac

SEQ ID NO: 6506 - DNA, 17 bp, Homo sapiens
gggcaggaatctccacc

SEQ ID NO: 6507 - DNA, 17 bp, Homo sapiens
ggcaggaatctccacca

SEQ ID NO: 6508 - DNA, 17 bp, Homo sapiens
gcaggaatctccaccac

SEQ ID NO: 6509 - DNA, 17 bp, Homo sapiens
caggaatctccaccacc

SEQ ID NO: 6510 - DNA, 17 bp, Homo sapiens
aggaatctccaccacca

SEQ ID NO: 6511 - DNA, 17 bp, Homo sapiens
ggaatctccaccaccac

SEQ ID NO: 6512 - DNA, 17 bp, Homo sapiens
gaatctccaccaccacc

SEQ ID NO: 6513 - DNA, 17 bp, Homo sapiens
aatctccaccaccaccg

SEQ ID NO: 6514 - DNA, 17 bp, Homo sapiens
atctccaccaccaccgc

SEQ ID NO: 6515 - DNA, 17 bp, Homo sapiens
tctccaccaccaccgca

SEQ ID NO: 6516 - DNA, 17 bp, Homo sapiens
ctccaccaccaccgcag

SEQ ID NO: 6517 - DNA, 17 bp, Homo sapiens
tccaccaccaccgcagc

SEQ ID NO: 6518 - DNA, 17 bp, Homo sapiens
ccaccaccaccgcagcc

SEQ ID NO: 6519 - DNA, 17 bp, Homo sapiens
caccaccaccgcagcct

SEQ ID NO: 6520 - DNA, 17 bp, Homo sapiens
accaccaccgcagcctg

SEQ ID NO: 6521 - DNA, 17 bp, Homo sapiens
ccaccaccgcagcctgg

SEQ ID NO: 6522 - DNA, 17 bp, Homo sapiens
caccaccgcagcctggt

SEQ ID NO: 6523 - DNA, 17 bp, Homo sapiens
accaccgcagcctggta

SEQ ID NO: 6524 - DNA, 17 bp, Homo sapiens
ccaccgcagcctggtag

SEQ ID NO: 6525 - DNA, 17 bp, Homo sapiens
caccgcagcctggtaga

SEQ ID NO: 6526 - DNA, 17 bp, Homo sapiens
accgcagcctggtagag

SEQ ID NO: 6527 - DNA, 17 bp, Homo sapiens
ccgcagcctggtagaga

SEQ ID NO: 6528 - DNA, 17 bp, Homo sapiens
cgcagcctggtagagac

SEQ ID NO: 6529 - DNA, 17 bp, Homo sapiens
gcagcctggtagagaca

SEQ ID NO: 6530 - DNA, 17 bp, Homo sapiens
cagcctggtagagacaa

SEQ ID NO: 6531 - DNA, 17 bp, Homo sapiens
agcctggtagagacaag

SEQ ID NO: 6532 - DNA, 17 bp, Homo sapiens
gcctggtagagacaagc

SEQ ID NO: 6533 - DNA, 17 bp, Homo sapiens
cctggtagagacaagcc

SEQ ID NO: 6534 - DNA, 17 bp, Homo sapiens
ctggtagagacaagcct

SEQ ID NO: 6535 - DNA, 17 bp, Homo sapiens
tggtagagacaagcctg

SEQ ID NO: 6536 - DNA, 17 bp, Homo sapiens
ggtagagacaagcctgg

SEQ ID NO: 6537 - DNA, 17 bp, Homo sapiens
gtagagacaagcctggg

SEQ ID NO: 6538 - DNA, 17 bp, Homo sapiens
tagagacaagcctgggg

SEQ ID NO: 6539 - DNA, 17 bp, Homo sapiens
agagacaagcctggggc

SEQ ID NO: 6540 - DNA, 17 bp, Homo sapiens
gagacaagcctggggca

SEQ ID NO: 6541 - DNA, 17 bp, Homo sapiens
agacaagcctggggcag

SEQ ID NO: 6542 - DNA, 17 bp, Homo sapiens
gacaagcctggggcagg

SEQ ID NO: 6543 - DNA, 17 bp, Homo sapiens
acaagcctggggcaggt

SEQ ID NO: 6544 - DNA, 17 bp, Homo sapiens
caagcctggggcaggtg

SEQ ID NO: 6545 - DNA, 17 bp, Homo sapiens
aagcctggggcaggtgg

SEQ ID NO: 6546 - DNA, 17 bp, Homo sapiens
agcctggggcaggtgga

SEQ ID NO: 6547 - DNA, 17 bp, Homo sapiens
gcctggggcaggtggac

SEQ ID NO: 6548 - DNA, 17 bp, Homo sapiens
cctggggcaggtggacc

SEQ ID NO: 6549 - DNA, 17 bp, Homo sapiens
ctggggcaggtggacct

SEQ ID NO: 6550 - DNA, 17 bp, Homo sapiens
tggggcaggtggacctc

SEQ ID NO: 6551 - DNA, 17 bp, Homo sapiens
ggggcaggtggacctct

SEQ ID NO: 6552 - DNA, 17 bp, Homo sapiens
gggcaggtggacctctg

SEQ ID NO: 6553 - DNA, 17 bp, Homo sapiens
ggcaggtggacctctgg

SEQ ID NO: 6554 - DNA, 17 bp, Homo sapiens
gcaggtggacctctggc

SEQ ID NO: 6555 - DNA, 17 bp, Homo sapiens
caggtggacctctggcc

SEQ ID NO: 6556 - DNA, 17 bp, Homo sapiens
aggtggacctctggccc

SEQ ID NO: 6557 - DNA, 17 bp, Homo sapiens
ggtggacctctggccct

SEQ ID NO: 6558 - DNA, 17 bp, Homo sapiens
gtggacctctggccctg

SEQ ID NO: 6559 - DNA, 17 bp, Homo sapiens
tggacctctggccctgg

SEQ ID NO: 6560 - DNA, 17 bp, Homo sapiens
ggacctctggccctgga

SEQ ID NO: 6561 - DNA, 17 bp, Homo sapiens
gacctctggccctggat

SEQ ID NO: 6562 - DNA, 17 bp, Homo sapiens
acctctggccctggata

SEQ ID NO: 6563 - DNA, 17 bp, Homo sapiens
cctctggccctggatat

SEQ ID NO: 6564 - DNA, 17 bp, Homo sapiens
ctctggccctggatatc

SEQ ID NO: 6565 - DNA, 17 bp, Homo sapiens
tctggccctggatatcc

SEQ ID NO: 6566 - DNA, 17 bp, Homo sapiens
ctggccctggatatccc

SEQ ID NO: 6567 - DNA, 17 bp, Homo sapiens
tggccctggatatccca

SEQ ID NO: 6568 - DNA, 17 bp, Homo sapiens
ggccctggatatcccag

SEQ ID NO: 6569 - DNA, 17 bp, Homo sapiens
gccctggatatcccagc

SEQ ID NO: 6570 - DNA, 17 bp, Homo sapiens
ccctggatatcccagca

SEQ ID NO: 6571 - DNA, 17 bp, Homo sapiens
cctggatatcccagcac

SEQ ID NO: 6572 - DNA, 17 bp, Homo sapiens
ctggatatcccagcact

SEQ ID NO: 6573 - DNA, 17 bp, Homo sapiens
tggatatcccagcactg

SEQ ID NO: 6574 - DNA, 17 bp, Homo sapiens
ggatatcccagcactga

SEQ ID NO: 6575 - DNA, 17 bp, Homo sapiens
gatatcccagcactgag

SEQ ID NO: 6576 - DNA, 17 bp, Homo sapiens
atatcccagcactgagg

SEQ ID NO: 6577 - DNA, 17 bp, Homo sapiens
tatcccagcactgaggg

SEQ ID NO: 6578 - DNA, 17 bp, Homo sapiens
atcccagcactgagggt

SEQ ID NO: 6579 - DNA, 17 bp, Homo sapiens
tcccagcactgagggtc

SEQ ID NO: 6580 - DNA, 17 bp, Homo sapiens
cccagcactgagggtcc

SEQ ID NO: 6581 - DNA, 17 bp, Homo sapiens
ccagcactgagggtcca

SEQ ID NO: 6582 - DNA, 17 bp, Homo sapiens
cagcactgagggtccag

SEQ ID NO: 6583 - DNA, 17 bp, Homo sapiens
agcactgagggtccagc

SEQ ID NO: 6584 - DNA, 17 bp, Homo sapiens
gcactgagggtccagct

SEQ ID NO: 6585 - DNA, 17 bp, Homo sapiens
cactgagggtccagctt

SEQ ID NO: 6586 - DNA, 17 bp, Homo sapiens
actgagggtccagcttg

SEQ ID NO: 6587 - DNA, 17 bp, Homo sapiens
ctgagggtccagcttgc

SEQ ID NO: 6588 - DNA, 17 bp, Homo sapiens
tgagggtccagcttgct

SEQ ID NO: 6589 - DNA, 17 bp, Homo sapiens
gagggtccagcttgctg

SEQ ID NO: 6590 - DNA, 17 bp, Homo sapiens
agggtccagcttgctgg

SEQ ID NO: 6591 - DNA, 17 bp, Homo sapiens
gggtccagcttgctggg

SEQ ID NO: 6592 - DNA, 17 bp, Homo sapiens
ggtccagcttgctgggt

SEQ ID NO: 6593 - DNA, 17 bp, Homo sapiens
gtccagcttgctgggtt

SEQ ID NO: 6594 - DNA, 17 bp, Homo sapiens
tccagcttgctgggttc

SEQ ID NO: 6595 - DNA, 17 bp, Homo sapiens
ccagcttgctgggttcc

SEQ ID NO: 6596 - DNA, 17 bp, Homo sapiens
cagcttgctgggttcca

SEQ ID NO: 6597 - DNA, 17 bp, Homo sapiens
agcttgctgggttccac

SEQ ID NO: 6598 - DNA, 17 bp, Homo sapiens
gcttgctgggttccaca

SEQ ID NO: 6599 - DNA, 17 bp, Homo sapiens
cttgctgggttccacat

SEQ ID NO: 6600 - DNA, 17 bp, Homo sapiens
ttgctgggttccacatc

SEQ ID NO: 6601 - DNA, 17 bp, Homo sapiens
tgctgggttccacatcc

SEQ ID NO: 6602 - DNA, 17 bp, Homo sapiens
gctgggttccacatcct

SEQ ID NO: 6603 - DNA, 17 bp, Homo sapiens
ctgggttccacatcctg

SEQ ID NO: 6604 - DNA, 17 bp, Homo sapiens
tgggttccacatcctgg

SEQ ID NO: 6605 - DNA, 17 bp, Homo sapiens
gggttccacatcctgga

SEQ ID NO: 6606 - DNA, 17 bp, Homo sapiens
ggttccacatcctggag

SEQ ID NO: 6607 - DNA, 17 bp, Homo sapiens
gttccacatcctggagg

SEQ ID NO: 6608 - DNA, 17 bp, Homo sapiens
ttccacatcctggaggc

SEQ ID NO: 6609 - DNA, 17 bp, Homo sapiens
tccacatcctggaggct

SEQ ID NO: 6610 - DNA, 17 bp, Homo sapiens
ccacatcctggaggctc

SEQ ID NO: 6611 - DNA, 17 bp, Homo sapiens
cacatcctggaggctct

SEQ ID NO: 6612 - DNA, 17 bp, Homo sapiens
acatcctggaggctctg

SEQ ID NO: 6613 - DNA, 17 bp, Homo sapiens
catcctggaggctctgc

SEQ ID NO: 6614 - DNA, 17 bp, Homo sapiens
atcctggaggctctgcg

SEQ ID NO: 6615 - DNA, 17 bp, Homo sapiens
tcctggaggctctgcgt

SEQ ID NO: 6616 - DNA, 17 bp, Homo sapiens
cctggaggctctgcgtc

SEQ ID NO: 6617 - DNA, 17 bp, Homo sapiens
ctggaggctctgcgtct

SEQ ID NO: 6618 - DNA, 17 bp, Homo sapiens
tggaggctctgcgtctg

SEQ ID NO: 6619 - DNA, 17 bp, Homo sapiens
ggaggctctgcgtctgc

SEQ ID NO: 6620 - DNA, 17 bp, Homo sapiens
gaggctctgcgtctgca

SEQ ID NO: 6621 - DNA, 17 bp, Homo sapiens
aggctctgcgtctgcat

SEQ ID NO: 6622 - DNA, 17 bp, Homo sapiens
ggctctgcgtctgcata

SEQ ID NO: 6623 - DNA, 17 bp, Homo sapiens
gctctgcgtctgcatag

SEQ ID NO: 6624 - DNA, 17 bp, Homo sapiens
ctctgcgtctgcatagg

SEQ ID NO: 6625 - DNA, 17 bp, Homo sapiens
tctgcgtctgcatagga

SEQ ID NO: 6626 - DNA, 17 bp, Homo sapiens
ctgcgtctgcataggac

SEQ ID NO: 6627 - DNA, 17 bp, Homo sapiens
tgcgtctgcataggaca

SEQ ID NO: 6628 - DNA, 17 bp, Homo sapiens
gcgtctgcataggacag

SEQ ID NO: 6629 - DNA, 17 bp, Homo sapiens
cgtctgcataggacagg

SEQ ID NO: 6630 - DNA, 17 bp, Homo sapiens
gtctgcataggacaggc

SEQ ID NO: 6631 - DNA, 17 bp, Homo sapiens
tctgcataggacaggct

SEQ ID NO: 6632 - DNA, 17 bp, Homo sapiens
ctgcataggacaggcta

SEQ ID NO: 6633 - DNA, 17 bp, Homo sapiens
tgcataggacaggctat

SEQ ID NO: 6634 - DNA, 17 bp, Homo sapiens
gcataggacaggctatg

SEQ ID NO: 6635 - DNA, 17 bp, Homo sapiens
cataggacaggctatgc

SEQ ID NO: 6636 - DNA, 17 bp, Homo sapiens
ataggacaggctatgct

SEQ ID NO: 6637 - DNA, 17 bp, Homo sapiens
taggacaggctatgctg

SEQ ID NO: 6638 - DNA, 17 bp, Homo sapiens
aggacaggctatgctga

SEQ ID NO: 6639 - DNA, 17 bp, Homo sapiens
ggacaggctatgctgac

SEQ ID NO: 6640 - DNA, 17 bp, Homo sapiens
gacaggctatgctgacc

SEQ ID NO: 6641 - DNA, 17 bp, Homo sapiens
acaggctatgctgacca

SEQ ID NO: 6642 - DNA, 17 bp, Homo sapiens
caggctatgctgaccac

SEQ ID NO: 6643 - DNA, 17 bp, Homo sapiens
aggctatgctgaccaca

SEQ ID NO: 6644 - DNA, 17 bp, Homo sapiens
ggctatgctgaccacat

SEQ ID NO: 6645 - DNA, 17 bp, Homo sapiens
gctatgctgaccacatg

SEQ ID NO: 6646 - DNA, 17 bp, Homo sapiens
ctatgctgaccacatgg

SEQ ID NO: 6647 - DNA, 17 bp, Homo sapiens
tatgctgaccacatggg

SEQ ID NO: 6648 - DNA, 17 bp, Homo sapiens
atgctgaccacatgggg

SEQ ID NO: 6649 - DNA, 17 bp, Homo sapiens
tgctgaccacatggggc

SEQ ID NO: 6650 - DNA, 17 bp, Homo sapiens
gctgaccacatggggct

SEQ ID NO: 6651 - DNA, 17 bp, Homo sapiens
ctgaccacatggggctc

SEQ ID NO: 6652 - DNA, 17 bp, Homo sapiens
tgaccacatggggctca

SEQ ID NO: 6653 - DNA, 17 bp, Homo sapiens
gaccacatggggctcac

SEQ ID NO: 6654 - DNA, 17 bp, Homo sapiens
accacatggggctcact

SEQ ID NO: 6655 - DNA, 17 bp, Homo sapiens
ccacatggggctcactc

SEQ ID NO: 6656 - DNA, 17 bp, Homo sapiens
cacatggggctcactcg

SEQ ID NO: 6657 - DNA, 17 bp, Homo sapiens
acatggggctcactcgc

SEQ ID NO: 6658 - DNA, 17 bp, Homo sapiens
catggggctcactcgct

SEQ ID NO: 6659 - DNA, 17 bp, Homo sapiens
atggggctcactcgctt

SEQ ID NO: 6660 - DNA, 17 bp, Homo sapiens
tggggctcactcgcttc

SEQ ID NO: 6661 - DNA, 17 bp, Homo sapiens
ggggctcactcgcttcc

SEQ ID NO: 6662 - DNA, 17 bp, Homo sapiens
gggctcactcgcttccg

SEQ ID NO: 6663 - DNA, 17 bp, Homo sapiens
ggctcactcgcttccgc

SEQ ID NO: 6664 - DNA, 17 bp, Homo sapiens
gctcactcgcttccgcc

SEQ ID NO: 6665 - DNA, 17 bp, Homo sapiens
ctcactcgcttccgccg

SEQ ID NO: 6666 - DNA, 17 bp, Homo sapiens
tcactcgcttccgccgg

SEQ ID NO: 6667 - DNA, 17 bp, Homo sapiens
cactcgcttccgccggc

SEQ ID NO: 6668 - DNA, 17 bp, Homo sapiens
actcgcttccgccggca

SEQ ID NO: 6669 - DNA, 17 bp, Homo sapiens
ctcgcttccgccggcaa

SEQ ID NO: 6670 - DNA, 17 bp, Homo sapiens
tcgcttccgccggcaat

SEQ ID NO: 6671 - DNA, 17 bp, Homo sapiens
cgcttccgccggcaatt

SEQ ID NO: 6672 - DNA, 17 bp, Homo sapiens
gcttccgccggcaattc

SEQ ID NO: 6673 - DNA, 17 bp, Homo sapiens
cttccgccggcaattcc

SEQ ID NO: 6674 - DNA, 17 bp, Homo sapiens
ttccgccggcaattcca

SEQ ID NO: 6675 - DNA, 17 bp, Homo sapiens
tccgccggcaattccag

SEQ ID NO: 6676 - DNA, 17 bp, Homo sapiens
ccgccggcaattccagg

SEQ ID NO: 6677 - DNA, 17 bp, Homo sapiens
cgccggcaattccaggt

SEQ ID NO: 6678 - DNA, 17 bp, Homo sapiens
gccggcaattccaggtg

SEQ ID NO: 6679 - DNA, 17 bp, Homo sapiens
ccggcaattccaggtgc

SEQ ID NO: 6680 - DNA, 17 bp, Homo sapiens
cggcaattccaggtgct

SEQ ID NO: 6681 - DNA, 17 bp, Homo sapiens
ggcaattccaggtgctg

SEQ ID NO: 6682 - DNA, 17 bp, Homo sapiens
gcaattccaggtgctgg

SEQ ID NO: 6683 - DNA, 17 bp, Homo sapiens
caattccaggtgctgga

SEQ ID NO: 6684 - DNA, 17 bp, Homo sapiens
aattccaggtgctggac

SEQ ID NO: 6685 - DNA, 17 bp, Homo sapiens
attccaggtgctggacg

SEQ ID NO: 6686 - DNA, 17 bp, Homo sapiens
ttccaggtgctggacgc

SEQ ID NO: 6687 - DNA, 17 bp, Homo sapiens
tccaggtgctggacgct

SEQ ID NO: 6688 - DNA, 17 bp, Homo sapiens
ccaggtgctggacgctc

SEQ ID NO: 6689 - DNA, 17 bp, Homo sapiens
caggtgctggacgctcc

SEQ ID NO: 6690 - DNA, 17 bp, Homo sapiens
aggtgctggacgctcca

SEQ ID NO: 6691 - DNA, 17 bp, Homo sapiens
ggtgctggacgctccac

SEQ ID NO: 6692 - DNA, 17 bp, Homo sapiens
gtgctggacgctccact

SEQ ID NO: 6693 - DNA, 17 bp, Homo sapiens
tgctggacgctccactc

SEQ ID NO: 6694 - DNA, 17 bp, Homo sapiens
gctggacgctccactcc

SEQ ID NO: 6695 - DNA, 17 bp, Homo sapiens
ctggacgctccactcct

SEQ ID NO: 6696 - DNA, 17 bp, Homo sapiens
tggacgctccactcctg

SEQ ID NO: 6697 - DNA, 17 bp, Homo sapiens
ggacgctccactcctga

SEQ ID NO: 6698 - DNA, 17 bp, Homo sapiens
gacgctccactcctgaa

SEQ ID NO: 6699 - DNA, 17 bp, Homo sapiens
acgctccactcctgaag

SEQ ID NO: 6700 - DNA, 17 bp, Homo sapiens
cgctccactcctgaaga

SEQ ID NO: 6701 - DNA, 17 bp, Homo sapiens
gctccactcctgaagaa

SEQ ID NO: 6702 - DNA, 17 bp, Homo sapiens
ctccactcctgaagaag

SEQ ID NO: 6703 - DNA, 17 bp, Homo sapiens
tccactcctgaagaagc

SEQ ID NO: 6704 - DNA, 17 bp, Homo sapiens
ccactcctgaagaagct

SEQ ID NO: 6705 - DNA, 17 bp, Homo sapiens
cactcctgaagaagctc

SEQ ID NO: 6706 - DNA, 17 bp, Homo sapiens
actcctgaagaagctca

SEQ ID NO: 6707 - DNA, 17 bp, Homo sapiens
ctcctgaagaagctcat

SEQ ID NO: 6708 - DNA, 17 bp, Homo sapiens
tcctgaagaagctcatg

SEQ ID NO: 6709 - DNA, 17 bp, Homo sapiens
cctgaagaagctcatgt

SEQ ID NO: 6710 - DNA, 17 bp, Homo sapiens
ctgaagaagctcatgtc

SEQ ID NO: 6711 - DNA, 17 bp, Homo sapiens
tgaagaagctcatgtcg

SEQ ID NO: 6712 - DNA, 17 bp, Homo sapiens
gaagaagctcatgtcga

SEQ ID NO: 6713 - DNA, 17 bp, Homo sapiens
aagaagctcatgtcgac

SEQ ID NO: 6714 - DNA, 17 bp, Homo sapiens
agaagctcatgtcgacc

SEQ ID NO: 6715 - DNA, 17 bp, Homo sapiens
gaagctcatgtcgacct

SEQ ID NO: 6716 - DNA, 17 bp, Homo sapiens
aagctcatgtcgacctc

SEQ ID NO: 6717 - DNA, 17 bp, Homo sapiens
agctcatgtcgacctcc

SEQ ID NO: 6718 - DNA, 17 bp, Homo sapiens
gctcatgtcgacctccg

SEQ ID NO: 6719 - DNA, 17 bp, Homo sapiens
ctcatgtcgacctccga

SEQ ID NO: 6720 - DNA, 17 bp, Homo sapiens
tcatgtcgacctccgag

SEQ ID NO: 6721 - DNA, 17 bp, Homo sapiens
catgtcgacctccgagg

SEQ ID NO: 6722 - DNA, 17 bp, Homo sapiens
atgtcgacctccgaggg

SEQ ID NO: 6723 - DNA, 17 bp, Homo sapiens
tgtcgacctccgaggga

SEQ ID NO: 6724 - DNA, 17 bp, Homo sapiens
gtcgacctccgagggaa

SEQ ID NO: 6725 - DNA, 17 bp, Homo sapiens
tcgacctccgagggaat

SEQ ID NO: 6726 - DNA, 17 bp, Homo sapiens
cgacctccgagggaata

SEQ ID NO: 6727 - DNA, 17 bp, Homo sapiens
gacctccgagggaatag

SEQ ID NO: 6728 - DNA, 17 bp, Homo sapiens
acctccgagggaataga

SEQ ID NO: 6729 - DNA, 17 bp, Homo sapiens
cctccgagggaatagat

SEQ ID NO: 6730 - DNA, 17 bp, Homo sapiens
ctccgagggaatagatg

SEQ ID NO: 6731 - DNA, 17 bp, Homo sapiens
tccgagggaatagatga

SEQ ID NO: 6732 - DNA, 17 bp, Homo sapiens
ccgagggaatagatgaa

SEQ ID NO: 6733 - DNA, 17 bp, Homo sapiens
cgagggaatagatgaaa

SEQ ID NO: 6734 - DNA, 17 bp, Homo sapiens
gagggaatagatgaaag

SEQ ID NO: 6735 - DNA, 17 bp, Homo sapiens
agggaatagatgaaagg

SEQ ID NO: 6736 - DNA, 17 bp, Homo sapiens
gggaatagatgaaagga

SEQ ID NO: 6737 - DNA, 17 bp, Homo sapiens
ggaatagatgaaaggaa

SEQ ID NO: 6738 - DNA, 17 bp, Homo sapiens
gaatagatgaaaggaag

SEQ ID NO: 6739 - DNA, 17 bp, Homo sapiens
aatagatgaaaggaagg

SEQ ID NO: 6740 - DNA, 17 bp, Homo sapiens
atagatgaaaggaaggc

SEQ ID NO: 6741 - DNA, 17 bp, Homo sapiens
tagatgaaaggaaggcc

SEQ ID NO: 6742 - DNA, 17 bp, Homo sapiens
agatgaaaggaaggccg

SEQ ID NO: 6743 - DNA, 17 bp, Homo sapiens
gatgaaaggaaggccgt

SEQ ID NO: 6744 - DNA, 17 bp, Homo sapiens
atgaaaggaaggccgtg

SEQ ID NO: 6745 - DNA, 17 bp, Homo sapiens
tgaaaggaaggccgtgg

SEQ ID NO: 6746 - DNA, 17 bp, Homo sapiens
gaaaggaaggccgtgga

SEQ ID NO: 6747 - DNA, 17 bp, Homo sapiens
aaaggaaggccgtggag

SEQ ID NO: 6748 - DNA, 17 bp, Homo sapiens
aaggaaggccgtggagg

SEQ ID NO: 6749 - DNA, 17 bp, Homo sapiens
aggaaggccgtggagga

SEQ ID NO: 6750 - DNA, 17 bp, Homo sapiens
ggaaggccgtggaggag

SEQ ID NO: 6751 - DNA, 17 bp, Homo sapiens
gaaggccgtggaggagc

SEQ ID NO: 6752 - DNA, 17 bp, Homo sapiens
aaggccgtggaggagct

SEQ ID NO: 6753 - DNA, 17 bp, Homo sapiens
aggccgtggaggagctc

SEQ ID NO: 6754 - DNA, 17 bp, Homo sapiens
ggccgtggaggagctcc

SEQ ID NO: 6755 - DNA, 17 bp, Homo sapiens
gccgtggaggagctcct

SEQ ID NO: 6756 - DNA, 17 bp, Homo sapiens
ccgtggaggagctcctg

SEQ ID NO: 6757 - DNA, 17 bp, Homo sapiens
cgtggaggagctcctgg

SEQ ID NO: 6758 - DNA, 17 bp, Homo sapiens
gtggaggagctcctgga

SEQ ID NO: 6759 - DNA, 17 bp, Homo sapiens
tggaggagctcctggag

SEQ ID NO: 6760 - DNA, 17 bp, Homo sapiens
ggaggagctcctggaga

SEQ ID NO: 6761 - DNA, 17 bp, Homo sapiens
gaggagctcctggagac

SEQ ID NO: 6762 - DNA, 17 bp, Homo sapiens
aggagctcctggagacc

SEQ ID NO: 6763 - DNA, 17 bp, Homo sapiens
ggagctcctggagaccc

SEQ ID NO: 6764 - DNA, 17 bp, Homo sapiens
gagctcctggagaccct

SEQ ID NO: 6765 - DNA, 17 bp, Homo sapiens
agctcctggagaccctg

SEQ ID NO: 6766 - DNA, 17 bp, Homo sapiens
gctcctggagaccctgg

SEQ ID NO: 6767 - DNA, 17 bp, Homo sapiens
ctcctggagaccctgga

SEQ ID NO: 6768 - DNA, 17 bp, Homo sapiens
tcctggagaccctggat

SEQ ID NO: 6769 - DNA, 17 bp, Homo sapiens
cctggagaccctggatc

SEQ ID NO: 6770 - DNA, 17 bp, Homo sapiens
ctggagaccctggatct

SEQ ID NO: 6771 - DNA, 17 bp, Homo sapiens
tggagaccctggatctg

SEQ ID NO: 6772 - DNA, 17 bp, Homo sapiens
ggagaccctggatctgg

SEQ ID NO: 6773 - DNA, 17 bp, Homo sapiens
gagaccctggatctgga

SEQ ID NO: 6774 - DNA, 17 bp, Homo sapiens
agaccctggatctggaa

SEQ ID NO: 6775 - DNA, 17 bp, Homo sapiens
gaccctggatctggaaa

SEQ ID NO: 6776 - DNA, 17 bp, Homo sapiens
accctggatctggaaaa

SEQ ID NO: 6777 - DNA, 17 bp, Homo sapiens
ccctggatctggaaaag

SEQ ID NO: 6778 - DNA, 17 bp, Homo sapiens
cctggatctggaaaaga

SEQ ID NO: 6779 - DNA, 17 bp, Homo sapiens
ctggatctggaaaagaa

SEQ ID NO: 6780 - DNA, 17 bp, Homo sapiens
tggatctggaaaagaag

SEQ ID NO: 6781 - DNA, 17 bp, Homo sapiens
ggatctggaaaagaagg

SEQ ID NO: 6782 - DNA, 17 bp, Homo sapiens
gatctggaaaagaaggc

SEQ ID NO: 6783 - DNA, 17 bp, Homo sapiens
atctggaaaagaaggcg

SEQ ID NO: 6784 - DNA, 17 bp, Homo sapiens
tctggaaaagaaggcgg

SEQ ID NO: 6785 - DNA, 17 bp, Homo sapiens
ctggaaaagaaggcggt

SEQ ID NO: 6786 - DNA, 17 bp, Homo sapiens
tggaaaagaaggcggtg

SEQ ID NO: 6787 - DNA, 17 bp, Homo sapiens
ggaaaagaaggcggtgg

SEQ ID NO: 6788 - DNA, 17 bp, Homo sapiens
gaaaagaaggcggtggc

SEQ ID NO: 6789 - DNA, 17 bp, Homo sapiens
aaaagaaggcggtggct

SEQ ID NO: 6790 - DNA, 17 bp, Homo sapiens
aaagaaggcggtggctg

SEQ ID NO: 6791 - DNA, 17 bp, Homo sapiens
aagaaggcggtggctgt

SEQ ID NO: 6792 - DNA, 17 bp, Homo sapiens
agaaggcggtggctgtg

SEQ ID NO: 6793 - DNA, 17 bp, Homo sapiens
gaaggcggtggctgtgg

SEQ ID NO: 6794 - DNA, 17 bp, Homo sapiens
aaggcggtggctgtggg

SEQ ID NO: 6795 - DNA, 17 bp, Homo sapiens
aggcggtggctgtgggg

SEQ ID NO: 6796 - DNA, 17 bp, Homo sapiens
ggcggtggctgtggggc

SEQ ID NO: 6797 - DNA, 17 bp, Homo sapiens
gcggtggctgtggggca

SEQ ID NO: 6798 - DNA, 17 bp, Homo sapiens
cggtggctgtggggcac

SEQ ID NO: 6799 - DNA, 17 bp, Homo sapiens
ggtggctgtggggcaca

SEQ ID NO: 6800 - DNA, 17 bp, Homo sapiens
gtggctgtggggcacag

SEQ ID NO: 6801 - DNA, 17 bp, Homo sapiens
tggctgtggggcacagc

SEQ ID NO: 6802 - DNA, 17 bp, Homo sapiens
ggctgtggggcacagcc

SEQ ID NO: 6803 - DNA, 17 bp, Homo sapiens
gctgtggggcacagcca

SEQ ID NO: 6804 - DNA, 17 bp, Homo sapiens
ctgtggggcacagccaa

SEQ ID NO: 6805 - DNA, 17 bp, Homo sapiens
tgtggggcacagccaag

SEQ ID NO: 6806 - DNA, 17 bp, Homo sapiens
gtggggcacagccaagt

SEQ ID NO: 6807 - DNA, 17 bp, Homo sapiens
tggggcacagccaagtt

SEQ ID NO: 6808 - DNA, 17 bp, Homo sapiens
ggggcacagccaagttt

SEQ ID NO: 6809 - DNA, 17 bp, Homo sapiens
gggcacagccaagtttt

SEQ ID NO: 6810 - DNA, 17 bp, Homo sapiens
ggcacagccaagttttt

SEQ ID NO: 6811 - DNA, 17 bp, Homo sapiens
gcacagccaagtttttc

SEQ ID NO: 6812 - DNA, 17 bp, Homo sapiens
cacagccaagtttttct

SEQ ID NO: 6813 - DNA, 17 bp, Homo sapiens
acagccaagtttttctc

SEQ ID NO: 6814 - DNA, 17 bp, Homo sapiens
cagccaagtttttctca

SEQ ID NO: 6815 - DNA, 17 bp, Homo sapiens
agccaagtttttctcaa

SEQ ID NO: 6816 - DNA, 17 bp, Homo sapiens
gccaagtttttctcaag

SEQ ID NO: 6817 - DNA, 17 bp, Homo sapiens
ccaagtttttctcaagg

SEQ ID NO: 6818 - DNA, 17 bp, Homo sapiens
caagtttttctcaaggc

SEQ ID NO: 6819 - DNA, 17 bp, Homo sapiens
aagtttttctcaaggca

SEQ ID NO: 6820 - DNA, 17 bp, Homo sapiens
agtttttctcaaggcag

SEQ ID NO: 6821 - DNA, 17 bp, Homo sapiens
gtttttctcaaggcagg

SEQ ID NO: 6822 - DNA, 17 bp, Homo sapiens
tttttctcaaggcaggt

SEQ ID NO: 6823 - DNA, 17 bp, Homo sapiens
ttttctcaaggcaggtg

SEQ ID NO: 6824 - DNA, 17 bp, Homo sapiens
tttctcaaggcaggtgt

SEQ ID NO: 6825 - DNA, 17 bp, Homo sapiens
ttctcaaggcaggtgtg

SEQ ID NO: 6826 - DNA, 17 bp, Homo sapiens
tctcaaggcaggtgtga

SEQ ID NO: 6827 - DNA, 17 bp, Homo sapiens
ctcaaggcaggtgtgat

SEQ ID NO: 6828 - DNA, 17 bp, Homo sapiens
tcaaggcaggtgtgatc

SEQ ID NO: 6829 - DNA, 17 bp, Homo sapiens
caaggcaggtgtgatct

SEQ ID NO: 6830 - DNA, 17 bp, Homo sapiens
aaggcaggtgtgatctc

SEQ ID NO: 6831 - DNA, 17 bp, Homo sapiens
aggcaggtgtgatctcc

SEQ ID NO: 6832 - DNA, 17 bp, Homo sapiens
ggcaggtgtgatctcca

SEQ ID NO: 6833 - DNA, 17 bp, Homo sapiens
gcaggtgtgatctccag

SEQ ID NO: 6834 - DNA, 17 bp, Homo sapiens
caggtgtgatctccagg

SEQ ID NO: 6835 - DNA, 17 bp, Homo sapiens
aggtgtgatctccaggc

SEQ ID NO: 6836 - DNA, 17 bp, Homo sapiens
ggtgtgatctccaggct

SEQ ID NO: 6837 - DNA, 17 bp, Homo sapiens
gtgtgatctccaggctt

SEQ ID NO: 6838 - DNA, 17 bp, Homo sapiens
tgtgatctccaggcttg

SEQ ID NO: 6839 - DNA, 17 bp, Homo sapiens
gtgatctccaggcttga

SEQ ID NO: 6840 - DNA, 17 bp, Homo sapiens
tgatctccaggcttgag

SEQ ID NO: 6841 - DNA, 17 bp, Homo sapiens
gatctccaggcttgaga

SEQ ID NO: 6842 - DNA, 17 bp, Homo sapiens
atctccaggcttgagaa

SEQ ID NO: 6843 - DNA, 17 bp, Homo sapiens
tctccaggcttgagaag

SEQ ID NO: 6844 - DNA, 17 bp, Homo sapiens
ctccaggcttgagaagc

SEQ ID NO: 6845 - DNA, 17 bp, Homo sapiens
tccaggcttgagaagca

SEQ ID NO: 6846 - DNA, 17 bp, Homo sapiens
ccaggcttgagaagcag

SEQ ID NO: 6847 - DNA, 17 bp, Homo sapiens
caggcttgagaagcagc

SEQ ID NO: 6848 - DNA, 17 bp, Homo sapiens
aggcttgagaagcagcg

SEQ ID NO: 6849 - DNA, 17 bp, Homo sapiens
ggcttgagaagcagcga

SEQ ID NO: 6850 - DNA, 17 bp, Homo sapiens
gcttgagaagcagcgag

SEQ ID NO: 6851 - DNA, 17 bp, Homo sapiens
cttgagaagcagcgaga

SEQ ID NO: 6852 - DNA, 17 bp, Homo sapiens
ttgagaagcagcgagag

SEQ ID NO: 6853 - DNA, 17 bp, Homo sapiens
tgagaagcagcgagaga

SEQ ID NO: 6854 - DNA, 17 bp, Homo sapiens
gagaagcagcgagagaa

SEQ ID NO: 6855 - DNA, 17 bp, Homo sapiens
agaagcagcgagagaag

SEQ ID NO: 6856 - DNA, 17 bp, Homo sapiens
gaagcagcgagagaagc

SEQ ID NO: 6857 - DNA, 17 bp, Homo sapiens
aagcagcgagagaagct

SEQ ID NO: 6858 - DNA, 17 bp, Homo sapiens
agcagcgagagaagctg

SEQ ID NO: 6859 - DNA, 17 bp, Homo sapiens
gcagcgagagaagctgg

SEQ ID NO: 6860 - DNA, 17 bp, Homo sapiens
cagcgagagaagctggt

SEQ ID NO: 6861 - DNA, 17 bp, Homo sapiens
agcgagagaagctggta

SEQ ID NO: 6862 - DNA, 17 bp, Homo sapiens
gcgagagaagctggtat

SEQ ID NO: 6863 - DNA, 17 bp, Homo sapiens
cgagagaagctggtatc

SEQ ID NO: 6864 - DNA, 17 bp, Homo sapiens
gagagaagctggtatct

SEQ ID NO: 6865 - DNA, 17 bp, Homo sapiens
agagaagctggtatctc

SEQ ID NO: 6866 - DNA, 17 bp, Homo sapiens
gagaagctggtatctca

SEQ ID NO: 6867 - DNA, 17 bp, Homo sapiens
agaagctggtatctcag

SEQ ID NO: 6868 - DNA, 17 bp, Homo sapiens
gaagctggtatctcaga

SEQ ID NO: 6869 - DNA, 17 bp, Homo sapiens
aagctggtatctcagag

SEQ ID NO: 6870 - DNA, 17 bp, Homo sapiens
agctggtatctcagagc

SEQ ID NO: 6871 - DNA, 17 bp, Homo sapiens
gctggtatctcagagca

SEQ ID NO: 6872 - DNA, 17 bp, Homo sapiens
ctggtatctcagagcat

SEQ ID NO: 6873 - DNA, 17 bp, Homo sapiens
tggtatctcagagcatc

SEQ ID NO: 6874 - DNA, 17 bp, Homo sapiens
ggtatctcagagcatcg

SEQ ID NO: 6875 - DNA, 17 bp, Homo sapiens
gtatctcagagcatcgt

SEQ ID NO: 6876 - DNA, 17 bp, Homo sapiens
tatctcagagcatcgtt

SEQ ID NO: 6877 - DNA, 17 bp, Homo sapiens
atctcagagcatcgttc

SEQ ID NO: 6878 - DNA, 17 bp, Homo sapiens
tctcagagcatcgttct

SEQ ID NO: 6879 - DNA, 17 bp, Homo sapiens
ctcagagcatcgttctc

SEQ ID NO: 6880 - DNA, 17 bp, Homo sapiens
tcagagcatcgttctct

SEQ ID NO: 6881 - DNA, 17 bp, Homo sapiens
cagagcatcgttctctt

SEQ ID NO: 6882 - DNA, 17 bp, Homo sapiens
agagcatcgttctcttc

SEQ ID NO: 6883 - DNA, 17 bp, Homo sapiens
gagcatcgttctcttcc

SEQ ID NO: 6884 - DNA, 17 bp, Homo sapiens
agcatcgttctcttcca

SEQ ID NO: 6885 - DNA, 17 bp, Homo sapiens
gcatcgttctcttccag

SEQ ID NO: 6886 - DNA, 17 bp, Homo sapiens
catcgttctcttccagg

SEQ ID NO: 6887 - DNA, 17 bp, Homo sapiens
atcgttctcttccaggc

SEQ ID NO: 6888 - DNA, 17 bp, Homo sapiens
tcgttctcttccaggcg

SEQ ID NO: 6889 - DNA, 17 bp, Homo sapiens
cgttctcttccaggcgg

SEQ ID NO: 6890 - DNA, 17 bp, Homo sapiens
gttctcttccaggcggc

SEQ ID NO: 6891 - DNA, 17 bp, Homo sapiens
ttctcttccaggcggct

SEQ ID NO: 6892 - DNA, 17 bp, Homo sapiens
tctcttccaggcggctt

SEQ ID NO: 6893 - DNA, 17 bp, Homo sapiens
ctcttccaggcggcttg

SEQ ID NO: 6894 - DNA, 17 bp, Homo sapiens
tcttccaggcggcttgc

SEQ ID NO: 6895 - DNA, 17 bp, Homo sapiens
cttccaggcggcttgca

SEQ ID NO: 6896 - DNA, 17 bp, Homo sapiens
ttccaggcggcttgcaa

SEQ ID NO: 6897 - DNA, 17 bp, Homo sapiens
tccaggcggcttgcaag

SEQ ID NO: 6898 - DNA, 17 bp, Homo sapiens
ccaggcggcttgcaagg

SEQ ID NO: 6899 - DNA, 17 bp, Homo sapiens
caggcggcttgcaaggg

SEQ ID NO: 6900 - DNA, 17 bp, Homo sapiens
aggcggcttgcaagggc

SEQ ID NO: 6901 - DNA, 17 bp, Homo sapiens
ggcggcttgcaagggct

SEQ ID NO: 6902 - DNA, 17 bp, Homo sapiens
gcggcttgcaagggctt

SEQ ID NO: 6903 - DNA, 17 bp, Homo sapiens
cggcttgcaagggcttt

SEQ ID NO: 6904 - DNA, 17 bp, Homo sapiens
ggcttgcaagggctttc

SEQ ID NO: 6905 - DNA, 17 bp, Homo sapiens
gcttgcaagggctttct

SEQ ID NO: 6906 - DNA, 17 bp, Homo sapiens
cttgcaagggctttctg

SEQ ID NO: 6907 - DNA, 17 bp, Homo sapiens
ttgcaagggctttctgt

SEQ ID NO: 6908 - DNA, 17 bp, Homo sapiens
tgcaagggctttctgtc

SEQ ID NO: 6909 - DNA, 17 bp, Homo sapiens
gcaagggctttctgtct

SEQ ID NO: 6910 - DNA, 17 bp, Homo sapiens
caagggctttctgtctc

SEQ ID NO: 6911 - DNA, 17 bp, Homo sapiens
aagggctttctgtctcg

SEQ ID NO: 6912 - DNA, 17 bp, Homo sapiens
agggctttctgtctcgc

SEQ ID NO: 6913 - DNA, 17 bp, Homo sapiens
gggctttctgtctcgcc

SEQ ID NO: 6914 - DNA, 17 bp, Homo sapiens
ggctttctgtctcgcca

SEQ ID NO: 6915 - DNA, 17 bp, Homo sapiens
gctttctgtctcgccag

SEQ ID NO: 6916 - DNA, 17 bp, Homo sapiens
ctttctgtctcgccagg

SEQ ID NO: 6917 - DNA, 17 bp, Homo sapiens
tttctgtctcgccagga

SEQ ID NO: 6918 - DNA, 17 bp, Homo sapiens
ttctgtctcgccaggaa

SEQ ID NO: 6919 - DNA, 17 bp, Homo sapiens
tctgtctcgccaggaat

SEQ ID NO: 6920 - DNA, 17 bp, Homo sapiens
ctgtctcgccaggaatt

SEQ ID NO: 6921 - DNA, 17 bp, Homo sapiens
tgtctcgccaggaattc

SEQ ID NO: 6922 - DNA, 17 bp, Homo sapiens
gtctcgccaggaattca

SEQ ID NO: 6923 - DNA, 17 bp, Homo sapiens
tctcgccaggaattcaa

SEQ ID NO: 6924 - DNA, 17 bp, Homo sapiens
ctcgccaggaattcaag

SEQ ID NO: 6925 - DNA, 17 bp, Homo sapiens
tcgccaggaattcaaga

SEQ ID NO: 6926 - DNA, 17 bp, Homo sapiens
cgccaggaattcaagaa

SEQ ID NO: 6927 - DNA, 17 bp, Homo sapiens
gccaggaattcaagaag

SEQ ID NO: 6928 - DNA, 17 bp, Homo sapiens
ccaggaattcaagaagc

SEQ ID NO: 6929 - DNA, 17 bp, Homo sapiens
caggaattcaagaagct

SEQ ID NO: 6930 - DNA, 17 bp, Homo sapiens
aggaattcaagaagctg

SEQ ID NO: 6931 - DNA, 17 bp, Homo sapiens
ggaattcaagaagctga

SEQ ID NO: 6932 - DNA, 17 bp, Homo sapiens
gaattcaagaagctgaa

SEQ ID NO: 6933 - DNA, 17 bp, Homo sapiens
aattcaagaagctgaag

SEQ ID NO: 6934 - DNA, 17 bp, Homo sapiens
attcaagaagctgaaga

SEQ ID NO: 6935 - DNA, 17 bp, Homo sapiens
ttcaagaagctgaagat

SEQ ID NO: 6936 - DNA, 17 bp, Homo sapiens
tcaagaagctgaagatt

SEQ ID NO: 6937 - DNA, 17 bp, Homo sapiens
caagaagctgaagattc

SEQ ID NO: 6938 - DNA, 17 bp, Homo sapiens
aagaagctgaagattcg

SEQ ID NO: 6939 - DNA, 17 bp, Homo sapiens
agaagctgaagattcgc

SEQ ID NO: 6940 - DNA, 17 bp, Homo sapiens
gaagctgaagattcgcc

SEQ ID NO: 6941 - DNA, 17 bp, Homo sapiens
aagctgaagattcgccg

SEQ ID NO: 6942 - DNA, 17 bp, Homo sapiens
agctgaagattcgccga

SEQ ID NO: 6943 - DNA, 17 bp, Homo sapiens
gctgaagattcgccgac

SEQ ID NO: 6944 - DNA, 17 bp, Homo sapiens
ctgaagattcgccgact

SEQ ID NO: 6945 - DNA, 17 bp, Homo sapiens
tgaagattcgccgactg

SEQ ID NO: 6946 - DNA, 17 bp, Homo sapiens
gaagattcgccgactgg

SEQ ID NO: 6947 - DNA, 17 bp, Homo sapiens
aagattcgccgactggc

SEQ ID NO: 6948 - DNA, 17 bp, Homo sapiens
agattcgccgactggct

SEQ ID NO: 6949 - DNA, 17 bp, Homo sapiens
gattcgccgactggctg

SEQ ID NO: 6950 - DNA, 17 bp, Homo sapiens
attcgccgactggctgc

SEQ ID NO: 6951 - DNA, 17 bp, Homo sapiens
ttcgccgactggctgca

SEQ ID NO: 6952 - DNA, 17 bp, Homo sapiens
tcgccgactggctgcac

SEQ ID NO: 6953 - DNA, 17 bp, Homo sapiens
cgccgactggctgcaca

SEQ ID NO: 6954 - DNA, 17 bp, Homo sapiens
gccgactggctgcacag

SEQ ID NO: 6955 - DNA, 17 bp, Homo sapiens
ccgactggctgcacagt

SEQ ID NO: 6956 - DNA, 17 bp, Homo sapiens
cgactggctgcacagtg

SEQ ID NO: 6957 - DNA, 17 bp, Homo sapiens
gactggctgcacagtgc

SEQ ID NO: 6958 - DNA, 17 bp, Homo sapiens
actggctgcacagtgca

SEQ ID NO: 6959 - DNA, 17 bp, Homo sapiens
ctggctgcacagtgcat

SEQ ID NO: 6960 - DNA, 17 bp, Homo sapiens
tggctgcacagtgcatc

SEQ ID NO: 6961 - DNA, 17 bp, Homo sapiens
ggctgcacagtgcatcc

SEQ ID NO: 6962 - DNA, 17 bp, Homo sapiens
gctgcacagtgcatcca

SEQ ID NO: 6963 - DNA, 17 bp, Homo sapiens
ctgcacagtgcatccag

SEQ ID NO: 6964 - DNA, 17 bp, Homo sapiens
tgcacagtgcatccaga

SEQ ID NO: 6965 - DNA, 17 bp, Homo sapiens
gcacagtgcatccagaa

SEQ ID NO: 6966 - DNA, 17 bp, Homo sapiens
cacagtgcatccagaag

SEQ ID NO: 6967 - DNA, 17 bp, Homo sapiens
acagtgcatccagaaga

SEQ ID NO: 6968 - DNA, 17 bp, Homo sapiens
cagtgcatccagaagaa

SEQ ID NO: 6969 - DNA, 17 bp, Homo sapiens
agtgcatccagaagaat

SEQ ID NO: 6970 - DNA, 17 bp, Homo sapiens
gtgcatccagaagaatg

SEQ ID NO: 6971 - DNA, 17 bp, Homo sapiens
tgcatccagaagaatgt

SEQ ID NO: 6972 - DNA, 17 bp, Homo sapiens
gcatccagaagaatgtg

SEQ ID NO: 6973 - DNA, 17 bp, Homo sapiens
catccagaagaatgtgg

SEQ ID NO: 6974 - DNA, 17 bp, Homo sapiens
atccagaagaatgtggc

SEQ ID NO: 6975 - DNA, 17 bp, Homo sapiens
tccagaagaatgtggct

SEQ ID NO: 6976 - DNA, 17 bp, Homo sapiens
ccagaagaatgtggctg

SEQ ID NO: 6977 - DNA, 17 bp, Homo sapiens
cagaagaatgtggctgt

SEQ ID NO: 6978 - DNA, 17 bp, Homo sapiens
agaagaatgtggctgtg

SEQ ID NO: 6979 - DNA, 17 bp, Homo sapiens
gaagaatgtggctgtgt

SEQ ID NO: 6980 - DNA, 17 bp, Homo sapiens
aagaatgtggctgtgtt

SEQ ID NO: 6981 - DNA, 17 bp, Homo sapiens
agaatgtggctgtgttc

SEQ ID NO: 6982 - DNA, 17 bp, Homo sapiens
gaatgtggctgtgttcc

SEQ ID NO: 6983 - DNA, 17 bp, Homo sapiens
aatgtggctgtgttcct

SEQ ID NO: 6984 - DNA, 17 bp, Homo sapiens
atgtggctgtgttcctc

SEQ ID NO: 6985 - DNA, 17 bp, Homo sapiens
tgtggctgtgttcctcg

SEQ ID NO: 6986 - DNA, 17 bp, Homo sapiens
gtggctgtgttcctcgc

SEQ ID NO: 6987 - DNA, 17 bp, Homo sapiens
tggctgtgttcctcgca

SEQ ID NO: 6988 - DNA, 17 bp, Homo sapiens
ggctgtgttcctcgcag

SEQ ID NO: 6989 - DNA, 17 bp, Homo sapiens
gctgtgttcctcgcagt

SEQ ID NO: 6990 - DNA, 17 bp, Homo sapiens
ctgtgttcctcgcagtc

SEQ ID NO: 6991 - DNA, 17 bp, Homo sapiens
tgtgttcctcgcagtca

SEQ ID NO: 6992 - DNA, 17 bp, Homo sapiens
gtgttcctcgcagtcaa

SEQ ID NO: 6993 - DNA, 17 bp, Homo sapiens
tgttcctcgcagtcaag

SEQ ID NO: 6994 - DNA, 17 bp, Homo sapiens
gttcctcgcagtcaagg

SEQ ID NO: 6995 - DNA, 17 bp, Homo sapiens
ttcctcgcagtcaagga

SEQ ID NO: 6996 - DNA, 17 bp, Homo sapiens
tcctcgcagtcaaggac

SEQ ID NO: 6997 - DNA, 17 bp, Homo sapiens
cctcgcagtcaaggact

SEQ ID NO: 6998 - DNA, 17 bp, Homo sapiens
ctcgcagtcaaggactg

SEQ ID NO: 6999 - DNA, 17 bp, Homo sapiens
tcgcagtcaaggactgg

SEQ ID NO: 7000 - DNA, 17 bp, Homo sapiens
cgcagtcaaggactggc

SEQ ID NO: 7001 - DNA, 17 bp, Homo sapiens
gcagtcaaggactggcc

SEQ ID NO: 7002 - DNA, 17 bp, Homo sapiens
cagtcaaggactggcca

SEQ ID NO: 7003 - DNA, 17 bp, Homo sapiens
agtcaaggactggccat

SEQ ID NO: 7004 - DNA, 17 bp, Homo sapiens
gtcaaggactggccatg

SEQ ID NO: 7005 - DNA, 17 bp, Homo sapiens
tcaaggactggccatgg

SEQ ID NO: 7006 - DNA, 17 bp, Homo sapiens
caaggactggccatggt

SEQ ID NO: 7007 - DNA, 17 bp, Homo sapiens
aaggactggccatggtg

SEQ ID NO: 7008 - DNA, 17 bp, Homo sapiens
aggactggccatggtgg

SEQ ID NO: 7009 - DNA, 17 bp, Homo sapiens
ggactggccatggtggc

SEQ ID NO: 7010 - DNA, 17 bp, Homo sapiens
gactggccatggtggca

SEQ ID NO: 7011 - DNA, 17 bp, Homo sapiens
actggccatggtggcag

SEQ ID NO: 7012 - DNA, 17 bp, Homo sapiens
ctggccatggtggcagc

SEQ ID NO: 7013 - DNA, 17 bp, Homo sapiens
tggccatggtggcagct

SEQ ID NO: 7014 - DNA, 17 bp, Homo sapiens
ggccatggtggcagctg

SEQ ID NO: 7015 - DNA, 17 bp, Homo sapiens
gccatggtggcagctgc

SEQ ID NO: 7016 - DNA, 17 bp, Homo sapiens
ccatggtggcagctgct

SEQ ID NO: 7017 - DNA, 17 bp, Homo sapiens
catggtggcagctgctt

SEQ ID NO: 7018 - DNA, 17 bp, Homo sapiens
atggtggcagctgcttg

SEQ ID NO: 7019 - DNA, 17 bp, Homo sapiens
tggtggcagctgcttgg

SEQ ID NO: 7020 - DNA, 17 bp, Homo sapiens
ggtggcagctgcttggt

SEQ ID NO: 7021 - DNA, 17 bp, Homo sapiens
gtggcagctgcttggtt

SEQ ID NO: 7022 - DNA, 17 bp, Homo sapiens
tggcagctgcttggttc

SEQ ID NO: 7023 - DNA, 17 bp, Homo sapiens
ggcagctgcttggttcc

SEQ ID NO: 7024 - DNA, 17 bp, Homo sapiens
gcagctgcttggttccc

SEQ ID NO: 7025 - DNA, 17 bp, Homo sapiens
cagctgcttggttccct

SEQ ID NO: 7026 - DNA, 17 bp, Homo sapiens
agctgcttggttccctc

SEQ ID NO: 7027 - DNA, 17 bp, Homo sapiens
gctgcttggttccctcc

SEQ ID NO: 7028 - DNA, 17 bp, Homo sapiens
ctgcttggttccctcca

SEQ ID NO: 7029 - DNA, 17 bp, Homo sapiens
tgcttggttccctccag

SEQ ID NO: 7030 - DNA, 17 bp, Homo sapiens
gcttggttccctccagc

SEQ ID NO: 7031 - DNA, 17 bp, Homo sapiens
cttggttccctccagcc

SEQ ID NO: 7032 - DNA, 17 bp, Homo sapiens
ttggttccctccagcct

SEQ ID NO: 7033 - DNA, 17 bp, Homo sapiens
tggttccctccagcctc

SEQ ID NO: 7034 - DNA, 17 bp, Homo sapiens
ggttccctccagcctct

SEQ ID NO: 7035 - DNA, 17 bp, Homo sapiens
gttccctccagcctcta

SEQ ID NO: 7036 - DNA, 17 bp, Homo sapiens
ttccctccagcctctac

SEQ ID NO: 7037 - DNA, 17 bp, Homo sapiens
tccctccagcctctact

SEQ ID NO: 7038 - DNA, 17 bp, Homo sapiens
ccctccagcctctactt

SEQ ID NO: 7039 - DNA, 17 bp, Homo sapiens
cctccagcctctactta

SEQ ID NO: 7040 - DNA, 17 bp, Homo sapiens
ctccagcctctacttag

SEQ ID NO: 7041 - DNA, 17 bp, Homo sapiens
tccagcctctacttagt

SEQ ID NO: 7042 - DNA, 17 bp, Homo sapiens
ccagcctctacttagtg

SEQ ID NO: 7043 - DNA, 17 bp, Homo sapiens
cagcctctacttagtgc

SEQ ID NO: 7044 - DNA, 17 bp, Homo sapiens
agcctctacttagtgcc

SEQ ID NO: 7045 - DNA, 17 bp, Homo sapiens
gcctctacttagtgcca

SEQ ID NO: 7046 - DNA, 17 bp, Homo sapiens
cctctacttagtgccac

SEQ ID NO: 7047 - DNA, 17 bp, Homo sapiens
ctctacttagtgccacc

SEQ ID NO: 7048 - DNA, 17 bp, Homo sapiens
tctacttagtgccacca

SEQ ID NO: 7049 - DNA, 17 bp, Homo sapiens
ctacttagtgccaccat

SEQ ID NO: 7050 - DNA, 17 bp, Homo sapiens
tacttagtgccaccatt

SEQ ID NO: 7051 - DNA, 17 bp, Homo sapiens
acttagtgccaccattg

SEQ ID NO: 7052 - DNA, 17 bp, Homo sapiens
cttagtgccaccattgg

SEQ ID NO: 7053 - DNA, 17 bp, Homo sapiens
ttagtgccaccattgga

SEQ ID NO: 7054 - DNA, 17 bp, Homo sapiens
tagtgccaccattggaa

SEQ ID NO: 7055 - DNA, 17 bp, Homo sapiens
agtgccaccattggaac

SEQ ID NO: 7056 - DNA, 17 bp, Homo sapiens
gtgccaccattggaact

SEQ ID NO: 7057 - DNA, 17 bp, Homo sapiens
tgccaccattggaactg

SEQ ID NO: 7058 - DNA, 17 bp, Homo sapiens
gccaccattggaactga

SEQ ID NO: 7059 - DNA, 17 bp, Homo sapiens
ccaccattggaactgag

SEQ ID NO: 7060 - DNA, 17 bp, Homo sapiens
caccattggaactgagc

SEQ ID NO: 7061 - DNA, 17 bp, Homo sapiens
accattggaactgagca

SEQ ID NO: 7062 - DNA, 17 bp, Homo sapiens
ccattggaactgagcag

SEQ ID NO: 7063 - DNA, 17 bp, Homo sapiens
cattggaactgagcagc

SEQ ID NO: 7064 - DNA, 17 bp, Homo sapiens
attggaactgagcagct

SEQ ID NO: 7065 - DNA, 17 bp, Homo sapiens
ttggaactgagcagctc

SEQ ID NO: 7066 - DNA, 17 bp, Homo sapiens
tggaactgagcagctcc

SEQ ID NO: 7067 - DNA, 17 bp, Homo sapiens
ggaactgagcagctccg

SEQ ID NO: 7068 - DNA, 17 bp, Homo sapiens
gaactgagcagctccga

SEQ ID NO: 7069 - DNA, 17 bp, Homo sapiens
aactgagcagctccgag

SEQ ID NO: 7070 - DNA, 17 bp, Homo sapiens
actgagcagctccgagc

SEQ ID NO: 7071 - DNA, 17 bp, Homo sapiens
ctgagcagctccgagcc

SEQ ID NO: 7072 - DNA, 17 bp, Homo sapiens
tgagcagctccgagcca

SEQ ID NO: 7073 - DNA, 17 bp, Homo sapiens
gagcagctccgagccaa

SEQ ID NO: 7074 - DNA, 17 bp, Homo sapiens
agcagctccgagccaag

SEQ ID NO: 7075 - DNA, 17 bp, Homo sapiens
gcagctccgagccaagg

SEQ ID NO: 7076 - DNA, 17 bp, Homo sapiens
cagctccgagccaagga

SEQ ID NO: 7077 - DNA, 17 bp, Homo sapiens
agctccgagccaaggag

SEQ ID NO: 7078 - DNA, 17 bp, Homo sapiens
gctccgagccaaggagg

SEQ ID NO: 7079 - DNA, 17 bp, Homo sapiens
ctccgagccaaggagga

SEQ ID NO: 7080 - DNA, 17 bp, Homo sapiens
tccgagccaaggaggag

SEQ ID NO: 7081 - DNA, 17 bp, Homo sapiens
ccgagccaaggaggagg

SEQ ID NO: 7082 - DNA, 17 bp, Homo sapiens
cgagccaaggaggagga

SEQ ID NO: 7083 - DNA, 17 bp, Homo sapiens
gagccaaggaggaggag

SEQ ID NO: 7084 - DNA, 17 bp, Homo sapiens
agccaaggaggaggagc

SEQ ID NO: 7085 - DNA, 17 bp, Homo sapiens
gccaaggaggaggagct

SEQ ID NO: 7086 - DNA, 17 bp, Homo sapiens
ccaaggaggaggagctt

SEQ ID NO: 7087 - DNA, 17 bp, Homo sapiens
caaggaggaggagctta

SEQ ID NO: 7088 - DNA, 17 bp, Homo sapiens
aaggaggaggagcttac

SEQ ID NO: 7089 - DNA, 17 bp, Homo sapiens
aggaggaggagcttaca

SEQ ID NO: 7090 - DNA, 17 bp, Homo sapiens
ggaggaggagcttacaa

SEQ ID NO: 7091 - DNA, 17 bp, Homo sapiens
gaggaggagcttacaac

SEQ ID NO: 7092 - DNA, 17 bp, Homo sapiens
aggaggagcttacaacg

SEQ ID NO: 7093 - DNA, 17 bp, Homo sapiens
ggaggagcttacaacgc

SEQ ID NO: 7094 - DNA, 17 bp, Homo sapiens
gaggagcttacaacgct

SEQ ID NO: 7095 - DNA, 17 bp, Homo sapiens
aggagcttacaacgcta

SEQ ID NO: 7096 - DNA, 17 bp, Homo sapiens
ggagcttacaacgctaa

SEQ ID NO: 7097 - DNA, 17 bp, Homo sapiens
gagcttacaacgctaag

SEQ ID NO: 7098 - DNA, 17 bp, Homo sapiens
agcttacaacgctaaga

SEQ ID NO: 7099 - DNA, 17 bp, Homo sapiens
gcttacaacgctaagac

SEQ ID NO: 7100 - DNA, 17 bp, Homo sapiens
cttacaacgctaagacg

SEQ ID NO: 7101 - DNA, 17 bp, Homo sapiens
ttacaacgctaagacgg

SEQ ID NO: 7102 - DNA, 17 bp, Homo sapiens
tacaacgctaagacgga

SEQ ID NO: 7103 - DNA, 17 bp, Homo sapiens
acaacgctaagacggaa

SEQ ID NO: 7104 - DNA, 17 bp, Homo sapiens
caacgctaagacggaag

SEQ ID NO: 7105 - DNA, 17 bp, Homo sapiens
aacgctaagacggaagc

SEQ ID NO: 7106 - DNA, 17 bp, Homo sapiens
acgctaagacggaagct

SEQ ID NO: 7107 - DNA, 17 bp, Homo sapiens
cgctaagacggaagcta

SEQ ID NO: 7108 - DNA, 17 bp, Homo sapiens
gctaagacggaagctag

SEQ ID NO: 7109 - DNA, 17 bp, Homo sapiens
ctaagacggaagctaga

SEQ ID NO: 7110 - DNA, 17 bp, Homo sapiens
taagacggaagctagaa

SEQ ID NO: 7111 - DNA, 17 bp, Homo sapiens
aagacggaagctagaaa

SEQ ID NO: 7112 - DNA, 17 bp, Homo sapiens
agacggaagctagaaaa

SEQ ID NO: 7113 - DNA, 17 bp, Homo sapiens
gacggaagctagaaaaa

SEQ ID NO: 7114 - DNA, 17 bp, Homo sapiens
acggaagctagaaaaat

SEQ ID NO: 7115 - DNA, 17 bp, Homo sapiens
cggaagctagaaaaatc

SEQ ID NO: 7116 - DNA, 17 bp, Homo sapiens
ggaagctagaaaaatca

SEQ ID NO: 7117 - DNA, 17 bp, Homo sapiens
gaagctagaaaaatcag

SEQ ID NO: 7118 - DNA, 17 bp, Homo sapiens
aagctagaaaaatcaga

SEQ ID NO: 7119 - DNA, 17 bp, Homo sapiens
agctagaaaaatcagag

SEQ ID NO: 7120 - DNA, 17 bp, Homo sapiens
gctagaaaaatcagaga

SEQ ID NO: 7121 - DNA, 17 bp, Homo sapiens
ctagaaaaatcagagaa

SEQ ID NO: 7122 - DNA, 17 bp, Homo sapiens
tagaaaaatcagagaag

SEQ ID NO: 7123 - DNA, 17 bp, Homo sapiens
agaaaaatcagagaagt

SEQ ID NO: 7124 - DNA, 17 bp, Homo sapiens
gaaaaatcagagaagtt

SEQ ID NO: 7125 - DNA, 17 bp, Homo sapiens
aaaaatcagagaagttg

SEQ ID NO: 7126 - DNA, 17 bp, Homo sapiens
aaaatcagagaagttgc

SEQ ID NO: 7127 - DNA, 17 bp, Homo sapiens
aaatcagagaagttgcg

SEQ ID NO: 7128 - DNA, 17 bp, Homo sapiens
aatcagagaagttgcgg

SEQ ID NO: 7129 - DNA, 17 bp, Homo sapiens
atcagagaagttgcgga

SEQ ID NO: 7130 - DNA, 17 bp, Homo sapiens
tcagagaagttgcggaa

SEQ ID NO: 7131 - DNA, 17 bp, Homo sapiens
cagagaagttgcggaat

SEQ ID NO: 7132 - DNA, 17 bp, Homo sapiens
agagaagttgcggaatg

SEQ ID NO: 7133 - DNA, 17 bp, Homo sapiens
gagaagttgcggaatga

SEQ ID NO: 7134 - DNA, 17 bp, Homo sapiens
agaagttgcggaatgaa

SEQ ID NO: 7135 - DNA, 17 bp, Homo sapiens
gaagttgcggaatgaac

SEQ ID NO: 7136 - DNA, 17 bp, Homo sapiens
aagttgcggaatgaact

SEQ ID NO: 7137 - DNA, 17 bp, Homo sapiens
agttgcggaatgaactc

SEQ ID NO: 7138 - DNA, 17 bp, Homo sapiens
gttgcggaatgaactcc

SEQ ID NO: 7139 - DNA, 17 bp, Homo sapiens
ttgcggaatgaactccg

SEQ ID NO: 7140 - DNA, 17 bp, Homo sapiens
tgcggaatgaactccgg

SEQ ID NO: 7141 - DNA, 17 bp, Homo sapiens
gcggaatgaactccggc

SEQ ID NO: 7142 - DNA, 17 bp, Homo sapiens
cggaatgaactccggca

SEQ ID NO: 7143 - DNA, 17 bp, Homo sapiens
ggaatgaactccggcag

SEQ ID NO: 7144 - DNA, 17 bp, Homo sapiens
gaatgaactccggcaga

SEQ ID NO: 7145 - DNA, 17 bp, Homo sapiens
aatgaactccggcagaa

SEQ ID NO: 7146 - DNA, 17 bp, Homo sapiens
atgaactccggcagaac

SEQ ID NO: 7147 - DNA, 17 bp, Homo sapiens
tgaactccggcagaaca

SEQ ID NO: 7148 - DNA, 17 bp, Homo sapiens
gaactccggcagaacac

SEQ ID NO: 7149 - DNA, 17 bp, Homo sapiens
aactccggcagaacaca

SEQ ID NO: 7150 - DNA, 17 bp, Homo sapiens
actccggcagaacacag

SEQ ID NO: 7151 - DNA, 17 bp, Homo sapiens
ctccggcagaacacaga

SEQ ID NO: 7152 - DNA, 17 bp, Homo sapiens
tccggcagaacacagat

SEQ ID NO: 7153 - DNA, 17 bp, Homo sapiens
ccggcagaacacagatc

SEQ ID NO: 7154 - DNA, 17 bp, Homo sapiens
cggcagaacacagatct

SEQ ID NO: 7155 - DNA, 17 bp, Homo sapiens
ggcagaacacagatctg

SEQ ID NO: 7156 - DNA, 17 bp, Homo sapiens
gcagaacacagatctgc

SEQ ID NO: 7157 - DNA, 17 bp, Homo sapiens
cagaacacagatctgct

SEQ ID NO: 7158 - DNA, 17 bp, Homo sapiens
agaacacagatctgcta

SEQ ID NO: 7159 - DNA, 17 bp, Homo sapiens
gaacacagatctgctag

SEQ ID NO: 7160 - DNA, 17 bp, Homo sapiens
aacacagatctgctaga

SEQ ID NO: 7161 - DNA, 17 bp, Homo sapiens
acacagatctgctagaa

SEQ ID NO: 7162 - DNA, 17 bp, Homo sapiens
cacagatctgctagaaa

SEQ ID NO: 7163 - DNA, 17 bp, Homo sapiens
acagatctgctagaaag

SEQ ID NO: 7164 - DNA, 17 bp, Homo sapiens
cagatctgctagaaagc

SEQ ID NO: 7165 - DNA, 17 bp, Homo sapiens
agatctgctagaaagca

SEQ ID NO: 7166 - DNA, 17 bp, Homo sapiens
gatctgctagaaagcaa

SEQ ID NO: 7167 - DNA, 17 bp, Homo sapiens
atctgctagaaagcaag

SEQ ID NO: 7168 - DNA, 17 bp, Homo sapiens
tctgctagaaagcaaga

SEQ ID NO: 7169 - DNA, 17 bp, Homo sapiens
ctgctagaaagcaagat

SEQ ID NO: 7170 - DNA, 17 bp, Homo sapiens
tgctagaaagcaagatt

SEQ ID NO: 7171 - DNA, 17 bp, Homo sapiens
gctagaaagcaagattg

SEQ ID NO: 7172 - DNA, 17 bp, Homo sapiens
ctagaaagcaagattgc

SEQ ID NO: 7173 - DNA, 17 bp, Homo sapiens
tagaaagcaagattgct

SEQ ID NO: 7174 - DNA, 17 bp, Homo sapiens
agaaagcaagattgctg

SEQ ID NO: 7175 - DNA, 17 bp, Homo sapiens
gaaagcaagattgctga

SEQ ID NO: 7176 - DNA, 17 bp, Homo sapiens
aaagcaagattgctgac

SEQ ID NO: 7177 - DNA, 17 bp, Homo sapiens
aagcaagattgctgact

SEQ ID NO: 7178 - DNA, 17 bp, Homo sapiens
agcaagattgctgactt

SEQ ID NO: 7179 - DNA, 17 bp, Homo sapiens
gcaagattgctgacttg

SEQ ID NO: 7180 - DNA, 17 bp, Homo sapiens
caagattgctgacttga

SEQ ID NO: 7181 - DNA, 17 bp, Homo sapiens
aagattgctgacttgac

SEQ ID NO: 7182 - DNA, 17 bp, Homo sapiens
agattgctgacttgacc

SEQ ID NO: 7183 - DNA, 17 bp, Homo sapiens
gattgctgacttgacct

SEQ ID NO: 7184 - DNA, 17 bp, Homo sapiens
attgctgacttgacctc

SEQ ID NO: 7185 - DNA, 17 bp, Homo sapiens
ttgctgacttgacctct

SEQ ID NO: 7186 - DNA, 17 bp, Homo sapiens
tgctgacttgacctctg

SEQ ID NO: 7187 - DNA, 17 bp, Homo sapiens
gctgacttgacctctga

SEQ ID NO: 7188 - DNA, 17 bp, Homo sapiens
ctgacttgacctctgac

SEQ ID NO: 7189 - DNA, 17 bp, Homo sapiens
tgacttgacctctgacc

SEQ ID NO: 7190 - DNA, 17 bp, Homo sapiens
gacttgacctctgacct

SEQ ID NO: 7191 - DNA, 17 bp, Homo sapiens
acttgacctctgacctt

SEQ ID NO: 7192 - DNA, 17 bp, Homo sapiens
cttgacctctgaccttg

SEQ ID NO: 7193 - DNA, 17 bp, Homo sapiens
ttgacctctgaccttgc

SEQ ID NO: 7194 - DNA, 17 bp, Homo sapiens
tgacctctgaccttgcc

SEQ ID NO: 7195 - DNA, 17 bp, Homo sapiens
gacctctgaccttgccg

SEQ ID NO: 7196 - DNA, 17 bp, Homo sapiens
acctctgaccttgccga

SEQ ID NO: 7197 - DNA, 17 bp, Homo sapiens
cctctgaccttgccgat

SEQ ID NO: 7198 - DNA, 17 bp, Homo sapiens
ctctgaccttgccgatg

SEQ ID NO: 7199 - DNA, 17 bp, Homo sapiens
tctgaccttgccgatga

SEQ ID NO: 7200 - DNA, 17 bp, Homo sapiens
ctgaccttgccgatgag

SEQ ID NO: 7201 - DNA, 17 bp, Homo sapiens
tgaccttgccgatgagc

SEQ ID NO: 7202 - DNA, 17 bp, Homo sapiens
gaccttgccgatgagcg

SEQ ID NO: 7203 - DNA, 17 bp, Homo sapiens
accttgccgatgagcgc

SEQ ID NO: 7204 - DNA, 17 bp, Homo sapiens
ccttgccgatgagcgct

SEQ ID NO: 7205 - DNA, 17 bp, Homo sapiens
cttgccgatgagcgctt

SEQ ID NO: 7206 - DNA, 17 bp, Homo sapiens
ttgccgatgagcgcttc

SEQ ID NO: 7207 - DNA, 17 bp, Homo sapiens
tgccgatgagcgcttca

SEQ ID NO: 7208 - DNA, 17 bp, Homo sapiens
gccgatgagcgcttcaa

SEQ ID NO: 7209 - DNA, 17 bp, Homo sapiens
ccgatgagcgcttcaaa

SEQ ID NO: 7210 - DNA, 17 bp, Homo sapiens
cgatgagcgcttcaaag

SEQ ID NO: 7211 - DNA, 17 bp, Homo sapiens
gatgagcgcttcaaagg

SEQ ID NO: 7212 - DNA, 17 bp, Homo sapiens
atgagcgcttcaaaggt

SEQ ID NO: 7213 - DNA, 17 bp, Homo sapiens
tgagcgcttcaaaggtg

SEQ ID NO: 7214 - DNA, 17 bp, Homo sapiens
gagcgcttcaaaggtga

SEQ ID NO: 7215 - DNA, 17 bp, Homo sapiens
agcgcttcaaaggtgat

SEQ ID NO: 7216 - DNA, 17 bp, Homo sapiens
gcgcttcaaaggtgatg

SEQ ID NO: 7217 - DNA, 17 bp, Homo sapiens
cgcttcaaaggtgatgt

SEQ ID NO: 7218 - DNA, 17 bp, Homo sapiens
gcttcaaaggtgatgtg

SEQ ID NO: 7219 - DNA, 17 bp, Homo sapiens
cttcaaaggtgatgtgg

SEQ ID NO: 7220 - DNA, 17 bp, Homo sapiens
ttcaaaggtgatgtggc

SEQ ID NO: 7221 - DNA, 17 bp, Homo sapiens
tcaaaggtgatgtggcc

SEQ ID NO: 7222 - DNA, 17 bp, Homo sapiens
caaaggtgatgtggcct

SEQ ID NO: 7223 - DNA, 17 bp, Homo sapiens
aaaggtgatgtggcctg

SEQ ID NO: 7224 - DNA, 17 bp, Homo sapiens
aaggtgatgtggcctgc

SEQ ID NO: 7225 - DNA, 17 bp, Homo sapiens
aggtgatgtggcctgcc

SEQ ID NO: 7226 - DNA, 17 bp, Homo sapiens
ggtgatgtggcctgcca

SEQ ID NO: 7227 - DNA, 17 bp, Homo sapiens
gtgatgtggcctgccag

SEQ ID NO: 7228 - DNA, 17 bp, Homo sapiens
tgatgtggcctgccagg

SEQ ID NO: 7229 - DNA, 17 bp, Homo sapiens
gatgtggcctgccaggt

SEQ ID NO: 7230 - DNA, 17 bp, Homo sapiens
atgtggcctgccaggtg

SEQ ID NO: 7231 - DNA, 17 bp, Homo sapiens
tgtggcctgccaggtgc

SEQ ID NO: 7232 - DNA, 17 bp, Homo sapiens
gtggcctgccaggtgct

SEQ ID NO: 7233 - DNA, 17 bp, Homo sapiens
tggcctgccaggtgctg

SEQ ID NO: 7234 - DNA, 17 bp, Homo sapiens
ggcctgccaggtgctgg

SEQ ID NO: 7235 - DNA, 17 bp, Homo sapiens
gcctgccaggtgctgga

SEQ ID NO: 7236 - DNA, 17 bp, Homo sapiens
cctgccaggtgctggag

SEQ ID NO: 7237 - DNA, 17 bp, Homo sapiens
ctgccaggtgctggaga

SEQ ID NO: 7238 - DNA, 17 bp, Homo sapiens
tgccaggtgctggagag

SEQ ID NO: 7239 - DNA, 17 bp, Homo sapiens
gccaggtgctggagagt

SEQ ID NO: 7240 - DNA, 17 bp, Homo sapiens
ccaggtgctggagagtg

SEQ ID NO: 7241 - DNA, 17 bp, Homo sapiens
caggtgctggagagtga

SEQ ID NO: 7242 - DNA, 17 bp, Homo sapiens
aggtgctggagagtgag

SEQ ID NO: 7243 - DNA, 17 bp, Homo sapiens
ggtgctggagagtgagc

SEQ ID NO: 7244 - DNA, 17 bp, Homo sapiens
gtgctggagagtgagcg

SEQ ID NO: 7245 - DNA, 17 bp, Homo sapiens
tgctggagagtgagcgg

SEQ ID NO: 7246 - DNA, 17 bp, Homo sapiens
gctggagagtgagcggg

SEQ ID NO: 7247 - DNA, 17 bp, Homo sapiens
ctggagagtgagcgggc

SEQ ID NO: 7248 - DNA, 17 bp, Homo sapiens
tggagagtgagcgggca

SEQ ID NO: 7249 - DNA, 17 bp, Homo sapiens
ggagagtgagcgggcag

SEQ ID NO: 7250 - DNA, 17 bp, Homo sapiens
gagagtgagcgggcaga

SEQ ID NO: 7251 - DNA, 17 bp, Homo sapiens
agagtgagcgggcagag

SEQ ID NO: 7252 - DNA, 17 bp, Homo sapiens
gagtgagcgggcagagc

SEQ ID NO: 7253 - DNA, 17 bp, Homo sapiens
agtgagcgggcagagcg

SEQ ID NO: 7254 - DNA, 17 bp, Homo sapiens
gtgagcgggcagagcgg

SEQ ID NO: 7255 - DNA, 17 bp, Homo sapiens
tgagcgggcagagcggc

SEQ ID NO: 7256 - DNA, 17 bp, Homo sapiens
gagcgggcagagcggct

SEQ ID NO: 7257 - DNA, 17 bp, Homo sapiens
agcgggcagagcggcta

SEQ ID NO: 7258 - DNA, 17 bp, Homo sapiens
gcgggcagagcggctac

SEQ ID NO: 7259 - DNA, 17 bp, Homo sapiens
cgggcagagcggctaca

SEQ ID NO: 7260 - DNA, 17 bp, Homo sapiens
gggcagagcggctacag

SEQ ID NO: 7261 - DNA, 17 bp, Homo sapiens
ggcagagcggctacagg

SEQ ID NO: 7262 - DNA, 17 bp, Homo sapiens
gcagagcggctacaggc

SEQ ID NO: 7263 - DNA, 17 bp, Homo sapiens
cagagcggctacaggcc

SEQ ID NO: 7264 - DNA, 17 bp, Homo sapiens
agagcggctacaggcct

SEQ ID NO: 7265 - DNA, 17 bp, Homo sapiens
gagcggctacaggcctt

SEQ ID NO: 7266 - DNA, 17 bp, Homo sapiens
agcggctacaggccttc

SEQ ID NO: 7267 - DNA, 17 bp, Homo sapiens
gcggctacaggccttcc

SEQ ID NO: 7268 - DNA, 17 bp, Homo sapiens
cggctacaggccttccg

SEQ ID NO: 7269 - DNA, 17 bp, Homo sapiens
ggctacaggccttccgg

SEQ ID NO: 7270 - DNA, 17 bp, Homo sapiens
gctacaggccttccggg

SEQ ID NO: 7271 - DNA, 17 bp, Homo sapiens
ctacaggccttccggga

SEQ ID NO: 7272 - DNA, 17 bp, Homo sapiens
tacaggccttccgggag

SEQ ID NO: 7273 - DNA, 17 bp, Homo sapiens
acaggccttccgggagg

SEQ ID NO: 7274 - DNA, 17 bp, Homo sapiens
caggccttccgggaggt

SEQ ID NO: 7275 - DNA, 17 bp, Homo sapiens
aggccttccgggaggtc

SEQ ID NO: 7276 - DNA, 17 bp, Homo sapiens
ggccttccgggaggtcc

SEQ ID NO: 7277 - DNA, 17 bp, Homo sapiens
gccttccgggaggtcca

SEQ ID NO: 7278 - DNA, 17 bp, Homo sapiens
ccttccgggaggtccag

SEQ ID NO: 7279 - DNA, 17 bp, Homo sapiens
cttccgggaggtccagg

SEQ ID NO: 7280 - DNA, 17 bp, Homo sapiens
ttccgggaggtccagga

SEQ ID NO: 7281 - DNA, 17 bp, Homo sapiens
tccgggaggtccaggag

SEQ ID NO: 7282 - DNA, 17 bp, Homo sapiens
ccgggaggtccaggagc

SEQ ID NO: 7283 - DNA, 17 bp, Homo sapiens
cgggaggtccaggagct

SEQ ID NO: 7284 - DNA, 17 bp, Homo sapiens
gggaggtccaggagctc

SEQ ID NO: 7285 - DNA, 17 bp, Homo sapiens
ggaggtccaggagctca

SEQ ID NO: 7286 - DNA, 17 bp, Homo sapiens
gaggtccaggagctcaa

SEQ ID NO: 7287 - DNA, 17 bp, Homo sapiens
aggtccaggagctcaag

SEQ ID NO: 7288 - DNA, 17 bp, Homo sapiens
ggtccaggagctcaaga

SEQ ID NO: 7289 - DNA, 17 bp, Homo sapiens
gtccaggagctcaagag

SEQ ID NO: 7290 - DNA, 17 bp, Homo sapiens
tccaggagctcaagagc

SEQ ID NO: 7291 - DNA, 17 bp, Homo sapiens
ccaggagctcaagagca

SEQ ID NO: 7292 - DNA, 17 bp, Homo sapiens
caggagctcaagagcaa

SEQ ID NO: 7293 - DNA, 17 bp, Homo sapiens
aggagctcaagagcaag

SEQ ID NO: 7294 - DNA, 17 bp, Homo sapiens
ggagctcaagagcaagc

SEQ ID NO: 7295 - DNA, 17 bp, Homo sapiens
gagctcaagagcaagca

SEQ ID NO: 7296 - DNA, 17 bp, Homo sapiens
agctcaagagcaagcat

SEQ ID NO: 7297 - DNA, 17 bp, Homo sapiens
gctcaagagcaagcatg

SEQ ID NO: 7298 - DNA, 17 bp, Homo sapiens
ctcaagagcaagcatga

SEQ ID NO: 7299 - DNA, 17 bp, Homo sapiens
tcaagagcaagcatgaa

SEQ ID NO: 7300 - DNA, 17 bp, Homo sapiens
caagagcaagcatgaac

SEQ ID NO: 7301 - DNA, 17 bp, Homo sapiens
aagagcaagcatgaaca

SEQ ID NO: 7302 - DNA, 17 bp, Homo sapiens
agagcaagcatgaacaa

SEQ ID NO: 7303 - DNA, 17 bp, Homo sapiens
gagcaagcatgaacaag

SEQ ID NO: 7304 - DNA, 17 bp, Homo sapiens
agcaagcatgaacaagt

SEQ ID NO: 7305 - DNA, 17 bp, Homo sapiens
gcaagcatgaacaagtc

SEQ ID NO: 7306 - DNA, 17 bp, Homo sapiens
caagcatgaacaagtcc

SEQ ID NO: 7307 - DNA, 17 bp, Homo sapiens
aagcatgaacaagtcca

SEQ ID NO: 7308 - DNA, 17 bp, Homo sapiens
agcatgaacaagtccag

SEQ ID NO: 7309 - DNA, 17 bp, Homo sapiens
gcatgaacaagtccaga

SEQ ID NO: 7310 - DNA, 17 bp, Homo sapiens
catgaacaagtccagaa

SEQ ID NO: 7311 - DNA, 17 bp, Homo sapiens
atgaacaagtccagaaa

SEQ ID NO: 7312 - DNA, 17 bp, Homo sapiens
tgaacaagtccagaaaa

SEQ ID NO: 7313 - DNA, 17 bp, Homo sapiens
gaacaagtccagaaaaa

SEQ ID NO: 7314 - DNA, 17 bp, Homo sapiens
aacaagtccagaaaaaa

SEQ ID NO: 7315 - DNA, 17 bp, Homo sapiens
acaagtccagaaaaaac

SEQ ID NO: 7316 - DNA, 17 bp, Homo sapiens
caagtccagaaaaaact

SEQ ID NO: 7317 - DNA, 17 bp, Homo sapiens
aagtccagaaaaaactg

SEQ ID NO: 7318 - DNA, 17 bp, Homo sapiens
agtccagaaaaaactgg

SEQ ID NO: 7319 - DNA, 17 bp, Homo sapiens
gtccagaaaaaactggg

SEQ ID NO: 7320 - DNA, 17 bp, Homo sapiens
tccagaaaaaactggga

SEQ ID NO: 7321 - DNA, 17 bp, Homo sapiens
ccagaaaaaactgggag

SEQ ID NO: 7322 - DNA, 17 bp, Homo sapiens
cagaaaaaactgggaga

SEQ ID NO: 7323 - DNA, 17 bp, Homo sapiens
agaaaaaactgggagat

SEQ ID NO: 7324 - DNA, 17 bp, Homo sapiens
gaaaaaactgggagatg

SEQ ID NO: 7325 - DNA, 17 bp, Homo sapiens
aaaaaactgggagatgt

SEQ ID NO: 7326 - DNA, 17 bp, Homo sapiens
aaaaactgggagatgtg

SEQ ID NO: 7327 - DNA, 17 bp, Homo sapiens
aaaactgggagatgtga

SEQ ID NO: 7328 - DNA, 17 bp, Homo sapiens
aaactgggagatgtgaa

SEQ ID NO: 7329 - DNA, 17 bp, Homo sapiens
aactgggagatgtgaat

SEQ ID NO: 7330 - DNA, 17 bp, Homo sapiens
actgggagatgtgaata

SEQ ID NO: 7331 - DNA, 17 bp, Homo sapiens
ctgggagatgtgaataa

SEQ ID NO: 7332 - DNA, 17 bp, Homo sapiens
tgggagatgtgaataaa

SEQ ID NO: 7333 - DNA, 17 bp, Homo sapiens
gggagatgtgaataaac

SEQ ID NO: 7334 - DNA, 17 bp, Homo sapiens
ggagatgtgaataaaca

SEQ ID NO: 7335 - DNA, 17 bp, Homo sapiens
gagatgtgaataaacag

SEQ ID NO: 7336 - DNA, 17 bp, Homo sapiens
agatgtgaataaacagt

SEQ ID NO: 7337 - DNA, 17 bp, Homo sapiens
gatgtgaataaacagtt

SEQ ID NO: 7338 - DNA, 17 bp, Homo sapiens
atgtgaataaacagttg

SEQ ID NO: 7339 - DNA, 17 bp, Homo sapiens
tgtgaataaacagttgg

SEQ ID NO: 7340 - DNA, 17 bp, Homo sapiens
gtgaataaacagttgga

SEQ ID NO: 7341 - DNA, 17 bp, Homo sapiens
tgaataaacagttggaa

SEQ ID NO: 7342 - DNA, 17 bp, Homo sapiens
gaataaacagttggaag

SEQ ID NO: 7343 - DNA, 17 bp, Homo sapiens
aataaacagttggaaga

SEQ ID NO: 7344 - DNA, 17 bp, Homo sapiens
ataaacagttggaagaa

SEQ ID NO: 7345 - DNA, 17 bp, Homo sapiens
taaacagttggaagaag

SEQ ID NO: 7346 - DNA, 17 bp, Homo sapiens
aaacagttggaagaagc

SEQ ID NO: 7347 - DNA, 17 bp, Homo sapiens
aacagttggaagaagcc

SEQ ID NO: 7348 - DNA, 17 bp, Homo sapiens
acagttggaagaagccc

SEQ ID NO: 7349 - DNA, 17 bp, Homo sapiens
cagttggaagaagccca

SEQ ID NO: 7350 - DNA, 17 bp, Homo sapiens
agttggaagaagcccag

SEQ ID NO: 7351 - DNA, 17 bp, Homo sapiens
gttggaagaagcccagc

SEQ ID NO: 7352 - DNA, 17 bp, Homo sapiens
ttggaagaagcccagca

SEQ ID NO: 7353 - DNA, 17 bp, Homo sapiens
tggaagaagcccagcag

SEQ ID NO: 7354 - DNA, 17 bp, Homo sapiens
ggaagaagcccagcaga

SEQ ID NO: 7355 - DNA, 17 bp, Homo sapiens
gaagaagcccagcagaa

SEQ ID NO: 7356 - DNA, 17 bp, Homo sapiens
aagaagcccagcagaaa

SEQ ID NO: 7357 - DNA, 17 bp, Homo sapiens
agaagcccagcagaaaa

SEQ ID NO: 7358 - DNA, 17 bp, Homo sapiens
gaagcccagcagaaaat

SEQ ID NO: 7359 - DNA, 17 bp, Homo sapiens
aagcccagcagaaaatt

SEQ ID NO: 7360 - DNA, 17 bp, Homo sapiens
agcccagcagaaaattc

SEQ ID NO: 7361 - DNA, 17 bp, Homo sapiens
gcccagcagaaaattca

SEQ ID NO: 7362 - DNA, 17 bp, Homo sapiens
cccagcagaaaattcag

SEQ ID NO: 7363 - DNA, 17 bp, Homo sapiens
ccagcagaaaattcagt

SEQ ID NO: 7364 - DNA, 17 bp, Homo sapiens
cagcagaaaattcagtt

SEQ ID NO: 7365 - DNA, 17 bp, Homo sapiens
agcagaaaattcagttg

SEQ ID NO: 7366 - DNA, 17 bp, Homo sapiens
gcagaaaattcagttga

SEQ ID NO: 7367 - DNA, 17 bp, Homo sapiens
cagaaaattcagttgaa

SEQ ID NO: 7368 - DNA, 17 bp, Homo sapiens
agaaaattcagttgaat

SEQ ID NO: 7369 - DNA, 17 bp, Homo sapiens
gaaaattcagttgaatg

SEQ ID NO: 7370 - DNA, 17 bp, Homo sapiens
aaaattcagttgaatga

SEQ ID NO: 7371 - DNA, 17 bp, Homo sapiens
aaattcagttgaatgac

SEQ ID NO: 7372 - DNA, 17 bp, Homo sapiens
aattcagttgaatgact

SEQ ID NO: 7373 - DNA, 17 bp, Homo sapiens
attcagttgaatgactt

SEQ ID NO: 7374 - DNA, 17 bp, Homo sapiens
ttcagttgaatgacttg

SEQ ID NO: 7375 - DNA, 17 bp, Homo sapiens
tcagttgaatgacttgg

SEQ ID NO: 7376 - DNA, 17 bp, Homo sapiens
cagttgaatgacttgga

SEQ ID NO: 7377 - DNA, 17 bp, Homo sapiens
agttgaatgacttggaa

SEQ ID NO: 7378 - DNA, 17 bp, Homo sapiens
gttgaatgacttggaaa

SEQ ID NO: 7379 - DNA, 17 bp, Homo sapiens
ttgaatgacttggaaag

SEQ ID NO: 7380 - DNA, 17 bp, Homo sapiens
tgaatgacttggaaagg

SEQ ID NO: 7381 - DNA, 17 bp, Homo sapiens
gaatgacttggaaaggg

SEQ ID NO: 7382 - DNA, 17 bp, Homo sapiens
aatgacttggaaaggga

SEQ ID NO: 7383 - DNA, 17 bp, Homo sapiens
atgacttggaaagggat

SEQ ID NO: 7384 - DNA, 17 bp, Homo sapiens
tgacttggaaagggatc

SEQ ID NO: 7385 - DNA, 17 bp, Homo sapiens
gacttggaaagggatcc

SEQ ID NO: 7386 - DNA, 17 bp, Homo sapiens
acttggaaagggatccc

SEQ ID NO: 7387 - DNA, 17 bp, Homo sapiens
cttggaaagggatccca

SEQ ID NO: 7388 - DNA, 17 bp, Homo sapiens
ttggaaagggatcccac

SEQ ID NO: 7389 - DNA, 17 bp, Homo sapiens
tggaaagggatcccact

SEQ ID NO: 7390 - DNA, 17 bp, Homo sapiens
ggaaagggatcccactg

SEQ ID NO: 7391 - DNA, 17 bp, Homo sapiens
gaaagggatcccactgg

SEQ ID NO: 7392 - DNA, 17 bp, Homo sapiens
aaagggatcccactgga

SEQ ID NO: 7393 - DNA, 17 bp, Homo sapiens
aagggatcccactggag

SEQ ID NO: 7394 - DNA, 17 bp, Homo sapiens
agggatcccactggagg

SEQ ID NO: 7395 - DNA, 17 bp, Homo sapiens
gggatcccactggagga

SEQ ID NO: 7396 - DNA, 17 bp, Homo sapiens
ggatcccactggaggag

SEQ ID NO: 7397 - DNA, 17 bp, Homo sapiens
gatcccactggaggagc

SEQ ID NO: 7398 - DNA, 17 bp, Homo sapiens
atcccactggaggagca

SEQ ID NO: 7399 - DNA, 17 bp, Homo sapiens
tcccactggaggagcag

SEQ ID NO: 7400 - DNA, 17 bp, Homo sapiens
cccactggaggagcaga

SEQ ID NO: 7401 - DNA, 17 bp, Homo sapiens
ccactggaggagcagac

SEQ ID NO: 7402 - DNA, 17 bp, Homo sapiens
cactggaggagcagacg

SEQ ID NO: 7403 - DNA, 17 bp, Homo sapiens
actggaggagcagacga

SEQ ID NO: 7404 - DNA, 17 bp, Homo sapiens
ctggaggagcagacgag

SEQ ID NO: 7405 - DNA, 17 bp, Homo sapiens
tggaggagcagacgagt

SEQ ID NO: 7406 - DNA, 17 bp, Homo sapiens
ggaggagcagacgagtg

SEQ ID NO: 7407 - DNA, 17 bp, Homo sapiens
gaggagcagacgagtgg

SEQ ID NO: 7408 - DNA, 17 bp, Homo sapiens
aggagcagacgagtggc

SEQ ID NO: 7409 - DNA, 17 bp, Homo sapiens
ggagcagacgagtggca

SEQ ID NO: 7410 - DNA, 17 bp, Homo sapiens
gagcagacgagtggcag

SEQ ID NO: 7411 - DNA, 17 bp, Homo sapiens
agcagacgagtggcaga

SEQ ID NO: 7412 - DNA, 17 bp, Homo sapiens
gcagacgagtggcagat

SEQ ID NO: 7413 - DNA, 17 bp, Homo sapiens
cagacgagtggcagatg

SEQ ID NO: 7414 - DNA, 17 bp, Homo sapiens
agacgagtggcagatgc

SEQ ID NO: 7415 - DNA, 17 bp, Homo sapiens
gacgagtggcagatgcg

SEQ ID NO: 7416 - DNA, 17 bp, Homo sapiens
acgagtggcagatgcgc

SEQ ID NO: 7417 - DNA, 17 bp, Homo sapiens
cgagtggcagatgcgct

SEQ ID NO: 7418 - DNA, 17 bp, Homo sapiens
gagtggcagatgcgctt

SEQ ID NO: 7419 - DNA, 17 bp, Homo sapiens
agtggcagatgcgcttc

SEQ ID NO: 7420 - DNA, 17 bp, Homo sapiens
gtggcagatgcgcttcg

SEQ ID NO: 7421 - DNA, 17 bp, Homo sapiens
tggcagatgcgcttcga

SEQ ID NO: 7422 - DNA, 17 bp, Homo sapiens
ggcagatgcgcttcgac

SEQ ID NO: 7423 - DNA, 17 bp, Homo sapiens
gcagatgcgcttcgact

SEQ ID NO: 7424 - DNA, 17 bp, Homo sapiens
cagatgcgcttcgactg

SEQ ID NO: 7425 - DNA, 17 bp, Homo sapiens
agatgcgcttcgactgt

SEQ ID NO: 7426 - DNA, 17 bp, Homo sapiens
gatgcgcttcgactgtg

SEQ ID NO: 7427 - DNA, 17 bp, Homo sapiens
atgcgcttcgactgtgc

SEQ ID NO: 7428 - DNA, 17 bp, Homo sapiens
tgcgcttcgactgtgct

SEQ ID NO: 7429 - DNA, 17 bp, Homo sapiens
gcgcttcgactgtgctc

SEQ ID NO: 7430 - DNA, 17 bp, Homo sapiens
cgcttcgactgtgctca

SEQ ID NO: 7431 - DNA, 17 bp, Homo sapiens
gcttcgactgtgctcag

SEQ ID NO: 7432 - DNA, 17 bp, Homo sapiens
cttcgactgtgctcaga

SEQ ID NO: 7433 - DNA, 17 bp, Homo sapiens
ttcgactgtgctcagat

SEQ ID NO: 7434 - DNA, 17 bp, Homo sapiens
tcgactgtgctcagatg

SEQ ID NO: 7435 - DNA, 17 bp, Homo sapiens
cgactgtgctcagatgg

SEQ ID NO: 7436 - DNA, 17 bp, Homo sapiens
gactgtgctcagatgga

SEQ ID NO: 7437 - DNA, 17 bp, Homo sapiens
actgtgctcagatggag

SEQ ID NO: 7438 - DNA, 17 bp, Homo sapiens
ctgtgctcagatggaga

SEQ ID NO: 7439 - DNA, 17 bp, Homo sapiens
tgtgctcagatggagaa

SEQ ID NO: 7440 - DNA, 17 bp, Homo sapiens
gtgctcagatggagaac

SEQ ID NO: 7441 - DNA, 17 bp, Homo sapiens
tgctcagatggagaacg

SEQ ID NO: 7442 - DNA, 17 bp, Homo sapiens
gctcagatggagaacga

SEQ ID NO: 7443 - DNA, 17 bp, Homo sapiens
ctcagatggagaacgag

SEQ ID NO: 7444 - DNA, 17 bp, Homo sapiens
tcagatggagaacgagt

SEQ ID NO: 7445 - DNA, 17 bp, Homo sapiens
cagatggagaacgagtt

SEQ ID NO: 7446 - DNA, 17 bp, Homo sapiens
agatggagaacgagttc

SEQ ID NO: 7447 - DNA, 17 bp, Homo sapiens
gatggagaacgagttcc

SEQ ID NO: 7448 - DNA, 17 bp, Homo sapiens
atggagaacgagttcct

SEQ ID NO: 7449 - DNA, 17 bp, Homo sapiens
tggagaacgagttcctc

SEQ ID NO: 7450 - DNA, 17 bp, Homo sapiens
ggagaacgagttcctca

SEQ ID NO: 7451 - DNA, 17 bp, Homo sapiens
gagaacgagttcctcag

SEQ ID NO: 7452 - DNA, 17 bp, Homo sapiens
agaacgagttcctcaga

SEQ ID NO: 7453 - DNA, 17 bp, Homo sapiens
gaacgagttcctcagaa

SEQ ID NO: 7454 - DNA, 17 bp, Homo sapiens
aacgagttcctcagaaa

SEQ ID NO: 7455 - DNA, 17 bp, Homo sapiens
acgagttcctcagaaag

SEQ ID NO: 7456 - DNA, 17 bp, Homo sapiens
cgagttcctcagaaagc

SEQ ID NO: 7457 - DNA, 17 bp, Homo sapiens
gagttcctcagaaagcg

SEQ ID NO: 7458 - DNA, 17 bp, Homo sapiens
agttcctcagaaagcgt

SEQ ID NO: 7459 - DNA, 17 bp, Homo sapiens
gttcctcagaaagcgtc

SEQ ID NO: 7460 - DNA, 17 bp, Homo sapiens
ttcctcagaaagcgtct

SEQ ID NO: 7461 - DNA, 17 bp, Homo sapiens
tcctcagaaagcgtctg

SEQ ID NO: 7462 - DNA, 17 bp, Homo sapiens
cctcagaaagcgtctgc

SEQ ID NO: 7463 - DNA, 17 bp, Homo sapiens
ctcagaaagcgtctgca

SEQ ID NO: 7464 - DNA, 17 bp, Homo sapiens
tcagaaagcgtctgcag

SEQ ID NO: 7465 - DNA, 17 bp, Homo sapiens
cagaaagcgtctgcagc

SEQ ID NO: 7466 - DNA, 17 bp, Homo sapiens
agaaagcgtctgcagca

SEQ ID NO: 7467 - DNA, 17 bp, Homo sapiens
gaaagcgtctgcagcaa

SEQ ID NO: 7468 - DNA, 17 bp, Homo sapiens
aaagcgtctgcagcaat

SEQ ID NO: 7469 - DNA, 17 bp, Homo sapiens
aagcgtctgcagcaatg

SEQ ID NO: 7470 - DNA, 17 bp, Homo sapiens
agcgtctgcagcaatgc

SEQ ID NO: 7471 - DNA, 17 bp, Homo sapiens
gcgtctgcagcaatgcg

SEQ ID NO: 7472 - DNA, 17 bp, Homo sapiens
cgtctgcagcaatgcga

SEQ ID NO: 7473 - DNA, 17 bp, Homo sapiens
gtctgcagcaatgcgag

SEQ ID NO: 7474 - DNA, 17 bp, Homo sapiens
tctgcagcaatgcgagg

SEQ ID NO: 7475 - DNA, 17 bp, Homo sapiens
ctgcagcaatgcgagga

SEQ ID NO: 7476 - DNA, 17 bp, Homo sapiens
tgcagcaatgcgaggag

SEQ ID NO: 7477 - DNA, 17 bp, Homo sapiens
gcagcaatgcgaggaga

SEQ ID NO: 7478 - DNA, 17 bp, Homo sapiens
cagcaatgcgaggagag

SEQ ID NO: 7479 - DNA, 17 bp, Homo sapiens
agcaatgcgaggagagg

SEQ ID NO: 7480 - DNA, 17 bp, Homo sapiens
gcaatgcgaggagaggc

SEQ ID NO: 7481 - DNA, 17 bp, Homo sapiens
caatgcgaggagaggct

SEQ ID NO: 7482 - DNA, 17 bp, Homo sapiens
aatgcgaggagaggctg

SEQ ID NO: 7483 - DNA, 17 bp, Homo sapiens
atgcgaggagaggctgg

SEQ ID NO: 7484 - DNA, 17 bp, Homo sapiens
tgcgaggagaggctgga

SEQ ID NO: 7485 - DNA, 17 bp, Homo sapiens
gcgaggagaggctggac

SEQ ID NO: 7486 - DNA, 17 bp, Homo sapiens
cgaggagaggctggact

SEQ ID NO: 7487 - DNA, 17 bp, Homo sapiens
gaggagaggctggactc

SEQ ID NO: 7488 - DNA, 17 bp, Homo sapiens
aggagaggctggactcg

SEQ ID NO: 7489 - DNA, 17 bp, Homo sapiens
ggagaggctggactcgg

SEQ ID NO: 7490 - DNA, 17 bp, Homo sapiens
gagaggctggactcgga

SEQ ID NO: 7491 - DNA, 17 bp, Homo sapiens
agaggctggactcggag

SEQ ID NO: 7492 - DNA, 17 bp, Homo sapiens
gaggctggactcggagc

SEQ ID NO: 7493 - DNA, 17 bp, Homo sapiens
aggctggactcggagct

SEQ ID NO: 7494 - DNA, 17 bp, Homo sapiens
ggctggactcggagctg

SEQ ID NO: 7495 - DNA, 17 bp, Homo sapiens
gctggactcggagctga

SEQ ID NO: 7496 - DNA, 17 bp, Homo sapiens
ctggactcggagctgac

SEQ ID NO: 7497 - DNA, 17 bp, Homo sapiens
tggactcggagctgaca

SEQ ID NO: 7498 - DNA, 17 bp, Homo sapiens
ggactcggagctgacag

SEQ ID NO: 7499 - DNA, 17 bp, Homo sapiens
gactcggagctgacagc

SEQ ID NO: 7500 - DNA, 17 bp, Homo sapiens
actcggagctgacagcc

SEQ ID NO: 7501 - DNA, 17 bp, Homo sapiens
ctcggagctgacagcca

SEQ ID NO: 7502 - DNA, 17 bp, Homo sapiens
tcggagctgacagccag

SEQ ID NO: 7503 - DNA, 17 bp, Homo sapiens
cggagctgacagccagg

SEQ ID NO: 7504 - DNA, 17 bp, Homo sapiens
ggagctgacagccagga

SEQ ID NO: 7505 - DNA, 17 bp, Homo sapiens
gagctgacagccaggaa

SEQ ID NO: 7506 - DNA, 17 bp, Homo sapiens
agctgacagccaggaaa

SEQ ID NO: 7507 - DNA, 17 bp, Homo sapiens
gctgacagccaggaaag

SEQ ID NO: 7508 - DNA, 17 bp, Homo sapiens
ctgacagccaggaaaga

SEQ ID NO: 7509 - DNA, 17 bp, Homo sapiens
tgacagccaggaaagag

SEQ ID NO: 7510 - DNA, 17 bp, Homo sapiens
gacagccaggaaagagc

SEQ ID NO: 7511 - DNA, 17 bp, Homo sapiens
acagccaggaaagagct

SEQ ID NO: 7512 - DNA, 17 bp, Homo sapiens
cagccaggaaagagctg

SEQ ID NO: 7513 - DNA, 17 bp, Homo sapiens
agccaggaaagagctgg

SEQ ID NO: 7514 - DNA, 17 bp, Homo sapiens
gccaggaaagagctgga

SEQ ID NO: 7515 - DNA, 17 bp, Homo sapiens
ccaggaaagagctggag

SEQ ID NO: 7516 - DNA, 17 bp, Homo sapiens
caggaaagagctggagc

SEQ ID NO: 7517 - DNA, 17 bp, Homo sapiens
aggaaagagctggagca

SEQ ID NO: 7518 - DNA, 17 bp, Homo sapiens
ggaaagagctggagcaa

SEQ ID NO: 7519 - DNA, 17 bp, Homo sapiens
gaaagagctggagcaaa

SEQ ID NO: 7520 - DNA, 17 bp, Homo sapiens
aaagagctggagcaaaa

SEQ ID NO: 7521 - DNA, 17 bp, Homo sapiens
aagagctggagcaaaag

SEQ ID NO: 7522 - DNA, 17 bp, Homo sapiens
agagctggagcaaaagc

SEQ ID NO: 7523 - DNA, 17 bp, Homo sapiens
gagctggagcaaaagct

SEQ ID NO: 7524 - DNA, 17 bp, Homo sapiens
agctggagcaaaagctt

SEQ ID NO: 7525 - DNA, 17 bp, Homo sapiens
gctggagcaaaagcttg

SEQ ID NO: 7526 - DNA, 17 bp, Homo sapiens
ctggagcaaaagcttgg

SEQ ID NO: 7527 - DNA, 17 bp, Homo sapiens
tggagcaaaagcttggg

SEQ ID NO: 7528 - DNA, 17 bp, Homo sapiens
ggagcaaaagcttgggg

SEQ ID NO: 7529 - DNA, 17 bp, Homo sapiens
gagcaaaagcttgggga

SEQ ID NO: 7530 - DNA, 17 bp, Homo sapiens
agcaaaagcttggggag

SEQ ID NO: 7531 - DNA, 17 bp, Homo sapiens
gcaaaagcttggggagt

SEQ ID NO: 7532 - DNA, 17 bp, Homo sapiens
caaaagcttggggagtt

SEQ ID NO: 7533 - DNA, 17 bp, Homo sapiens
aaaagcttggggagttg

SEQ ID NO: 7534 - DNA, 17 bp, Homo sapiens
aaagcttggggagttgc

SEQ ID NO: 7535 - DNA, 17 bp, Homo sapiens
aagcttggggagttgca

SEQ ID NO: 7536 - DNA, 17 bp, Homo sapiens
agcttggggagttgcaa

SEQ ID NO: 7537 - DNA, 17 bp, Homo sapiens
gcttggggagttgcaaa

SEQ ID NO: 7538 - DNA, 17 bp, Homo sapiens
cttggggagttgcaaag

SEQ ID NO: 7539 - DNA, 17 bp, Homo sapiens
ttggggagttgcaaagt

SEQ ID NO: 7540 - DNA, 17 bp, Homo sapiens
tggggagttgcaaagtg

SEQ ID NO: 7541 - DNA, 17 bp, Homo sapiens
ggggagttgcaaagtgc

SEQ ID NO: 7542 - DNA, 17 bp, Homo sapiens
gggagttgcaaagtgct

SEQ ID NO: 7543 - DNA, 17 bp, Homo sapiens
ggagttgcaaagtgctt

SEQ ID NO: 7544 - DNA, 17 bp, Homo sapiens
gagttgcaaagtgctta

SEQ ID NO: 7545 - DNA, 17 bp, Homo sapiens
agttgcaaagtgcttat

SEQ ID NO: 7546 - DNA, 17 bp, Homo sapiens
gttgcaaagtgcttatg

SEQ ID NO: 7547 - DNA, 17 bp, Homo sapiens
ttgcaaagtgcttatga

SEQ ID NO: 7548 - DNA, 17 bp, Homo sapiens
tgcaaagtgcttatgac

SEQ ID NO: 7549 - DNA, 17 bp, Homo sapiens
gcaaagtgcttatgacg

SEQ ID NO: 7550 - DNA, 17 bp, Homo sapiens
caaagtgcttatgacgg

SEQ ID NO: 7551 - DNA, 17 bp, Homo sapiens
aaagtgcttatgacggg

SEQ ID NO: 7552 - DNA, 17 bp, Homo sapiens
aagtgcttatgacgggg

SEQ ID NO: 7553 - DNA, 17 bp, Homo sapiens
agtgcttatgacggggc

SEQ ID NO: 7554 - DNA, 17 bp, Homo sapiens
gtgcttatgacggggcc

SEQ ID NO: 7555 - DNA, 17 bp, Homo sapiens
tgcttatgacggggcca

SEQ ID NO: 7556 - DNA, 17 bp, Homo sapiens
gcttatgacggggccaa

SEQ ID NO: 7557 - DNA, 17 bp, Homo sapiens
cttatgacggggccaag

SEQ ID NO: 7558 - DNA, 17 bp, Homo sapiens
ttatgacggggccaaga

SEQ ID NO: 7559 - DNA, 17 bp, Homo sapiens
tatgacggggccaagaa

SEQ ID NO: 7560 - DNA, 17 bp, Homo sapiens
atgacggggccaagaag

SEQ ID NO: 7561 - DNA, 17 bp, Homo sapiens
tgacggggccaagaaga

SEQ ID NO: 7562 - DNA, 17 bp, Homo sapiens
gacggggccaagaagat

SEQ ID NO: 7563 - DNA, 17 bp, Homo sapiens
acggggccaagaagatg

SEQ ID NO: 7564 - DNA, 17 bp, Homo sapiens
cggggccaagaagatgg

SEQ ID NO: 7565 - DNA, 17 bp, Homo sapiens
ggggccaagaagatggc

SEQ ID NO: 7566 - DNA, 17 bp, Homo sapiens
gggccaagaagatggct

SEQ ID NO: 7567 - DNA, 17 bp, Homo sapiens
ggccaagaagatggctc

SEQ ID NO: 7568 - DNA, 17 bp, Homo sapiens
gccaagaagatggctca

SEQ ID NO: 7569 - DNA, 17 bp, Homo sapiens
ccaagaagatggctcac

SEQ ID NO: 7570 - DNA, 17 bp, Homo sapiens
caagaagatggctcacc

SEQ ID NO: 7571 - DNA, 17 bp, Homo sapiens
aagaagatggctcacca

SEQ ID NO: 7572 - DNA, 17 bp, Homo sapiens
agaagatggctcaccaa

SEQ ID NO: 7573 - DNA, 17 bp, Homo sapiens
gaagatggctcaccaac

SEQ ID NO: 7574 - DNA, 17 bp, Homo sapiens
aagatggctcaccaact

SEQ ID NO: 7575 - DNA, 17 bp, Homo sapiens
agatggctcaccaactg

SEQ ID NO: 7576 - DNA, 17 bp, Homo sapiens
gatggctcaccaactga

SEQ ID NO: 7577 - DNA, 17 bp, Homo sapiens
atggctcaccaactgaa

SEQ ID NO: 7578 - DNA, 17 bp, Homo sapiens
tggctcaccaactgaag

SEQ ID NO: 7579 - DNA, 17 bp, Homo sapiens
ggctcaccaactgaaga

SEQ ID NO: 7580 - DNA, 17 bp, Homo sapiens
gctcaccaactgaagag

SEQ ID NO: 7581 - DNA, 17 bp, Homo sapiens
ctcaccaactgaagagg

SEQ ID NO: 7582 - DNA, 17 bp, Homo sapiens
tcaccaactgaagagga

SEQ ID NO: 7583 - DNA, 17 bp, Homo sapiens
caccaactgaagaggaa

SEQ ID NO: 7584 - DNA, 17 bp, Homo sapiens
accaactgaagaggaag

SEQ ID NO: 7585 - DNA, 17 bp, Homo sapiens
ccaactgaagaggaagt

SEQ ID NO: 7586 - DNA, 17 bp, Homo sapiens
caactgaagaggaagtg

SEQ ID NO: 7587 - DNA, 17 bp, Homo sapiens
aactgaagaggaagtgc

SEQ ID NO: 7588 - DNA, 17 bp, Homo sapiens
actgaagaggaagtgcc

SEQ ID NO: 7589 - DNA, 17 bp, Homo sapiens
ctgaagaggaagtgcca

SEQ ID NO: 7590 - DNA, 17 bp, Homo sapiens
tgaagaggaagtgccac

SEQ ID NO: 7591 - DNA, 17 bp, Homo sapiens
gaagaggaagtgccacc

SEQ ID NO: 7592 - DNA, 17 bp, Homo sapiens
aagaggaagtgccacca

SEQ ID NO: 7593 - DNA, 17 bp, Homo sapiens
agaggaagtgccaccat

SEQ ID NO: 7594 - DNA, 17 bp, Homo sapiens
gaggaagtgccaccatc

SEQ ID NO: 7595 - DNA, 17 bp, Homo sapiens
aggaagtgccaccatct

SEQ ID NO: 7596 - DNA, 17 bp, Homo sapiens
ggaagtgccaccatctt

SEQ ID NO: 7597 - DNA, 17 bp, Homo sapiens
gaagtgccaccatctta

SEQ ID NO: 7598 - DNA, 17 bp, Homo sapiens
aagtgccaccatcttac

SEQ ID NO: 7599 - DNA, 17 bp, Homo sapiens
agtgccaccatcttacc

SEQ ID NO: 7600 - DNA, 17 bp, Homo sapiens
gtgccaccatcttacct

SEQ ID NO: 7601 - DNA, 17 bp, Homo sapiens
tgccaccatcttacctg

SEQ ID NO: 7602 - DNA, 17 bp, Homo sapiens
gccaccatcttacctgt

SEQ ID NO: 7603 - DNA, 17 bp, Homo sapiens
ccaccatcttacctgtg

SEQ ID NO: 7604 - DNA, 17 bp, Homo sapiens
caccatcttacctgtga

SEQ ID NO: 7605 - DNA, 17 bp, Homo sapiens
accatcttacctgtgac

SEQ ID NO: 7606 - DNA, 17 bp, Homo sapiens
ccatcttacctgtgacc

SEQ ID NO: 7607 - DNA, 17 bp, Homo sapiens
catcttacctgtgacct

SEQ ID NO: 7608 - DNA, 17 bp, Homo sapiens
atcttacctgtgacctt

SEQ ID NO: 7609 - DNA, 17 bp, Homo sapiens
tcttacctgtgaccttg

SEQ ID NO: 7610 - DNA, 17 bp, Homo sapiens
cttacctgtgaccttga

SEQ ID NO: 7611 - DNA, 17 bp, Homo sapiens
ttacctgtgaccttgag

SEQ ID NO: 7612 - DNA, 17 bp, Homo sapiens
tacctgtgaccttgagg

SEQ ID NO: 7613 - DNA, 17 bp, Homo sapiens
acctgtgaccttgagga

SEQ ID NO: 7614 - DNA, 17 bp, Homo sapiens
cctgtgaccttgaggat

SEQ ID NO: 7615 - DNA, 17 bp, Homo sapiens
ctgtgaccttgaggata

SEQ ID NO: 7616 - DNA, 17 bp, Homo sapiens
tgtgaccttgaggatac

SEQ ID NO: 7617 - DNA, 17 bp, Homo sapiens
gtgaccttgaggatacc

SEQ ID NO: 7618 - DNA, 17 bp, Homo sapiens
tgaccttgaggatacct

SEQ ID NO: 7619 - DNA, 17 bp, Homo sapiens
gaccttgaggatacctg

SEQ ID NO: 7620 - DNA, 17 bp, Homo sapiens
accttgaggatacctgc

SEQ ID NO: 7621 - DNA, 17 bp, Homo sapiens
ccttgaggatacctgcg

SEQ ID NO: 7622 - DNA, 17 bp, Homo sapiens
cttgaggatacctgcgt

SEQ ID NO: 7623 - DNA, 17 bp, Homo sapiens
ttgaggatacctgcgtc

SEQ ID NO: 7624 - DNA, 17 bp, Homo sapiens
tgaggatacctgcgtcc

SEQ ID NO: 7625 - DNA, 17 bp, Homo sapiens
gaggatacctgcgtcct

SEQ ID NO: 7626 - DNA, 17 bp, Homo sapiens
aggatacctgcgtcctg

SEQ ID NO: 7627 - DNA, 17 bp, Homo sapiens
ggatacctgcgtcctgc

SEQ ID NO: 7628 - DNA, 17 bp, Homo sapiens
gatacctgcgtcctgct

SEQ ID NO: 7629 - DNA, 17 bp, Homo sapiens
atacctgcgtcctgcta

SEQ ID NO: 7630 - DNA, 17 bp, Homo sapiens
tacctgcgtcctgctag

SEQ ID NO: 7631 - DNA, 17 bp, Homo sapiens
acctgcgtcctgctaga

SEQ ID NO: 7632 - DNA, 17 bp, Homo sapiens
cctgcgtcctgctagag

SEQ ID NO: 7633 - DNA, 17 bp, Homo sapiens
ctgcgtcctgctagaga

SEQ ID NO: 7634 - DNA, 17 bp, Homo sapiens
tgcgtcctgctagagaa

SEQ ID NO: 7635 - DNA, 17 bp, Homo sapiens
gcgtcctgctagagaac

SEQ ID NO: 7636 - DNA, 17 bp, Homo sapiens
cgtcctgctagagaacc

SEQ ID NO: 7637 - DNA, 17 bp, Homo sapiens
gtcctgctagagaacca

SEQ ID NO: 7638 - DNA, 17 bp, Homo sapiens
tcctgctagagaaccaa

SEQ ID NO: 7639 - DNA, 17 bp, Homo sapiens
cctgctagagaaccaac

SEQ ID NO: 7640 - DNA, 17 bp, Homo sapiens
ctgctagagaaccaaca

SEQ ID NO: 7641 - DNA, 17 bp, Homo sapiens
tgctagagaaccaacaa

SEQ ID NO: 7642 - DNA, 17 bp, Homo sapiens
gctagagaaccaacaaa

SEQ ID NO: 7643 - DNA, 17 bp, Homo sapiens
ctagagaaccaacaaag

SEQ ID NO: 7644 - DNA, 17 bp, Homo sapiens
tagagaaccaacaaagt

SEQ ID NO: 7645 - DNA, 17 bp, Homo sapiens
agagaaccaacaaagtc

SEQ ID NO: 7646 - DNA, 17 bp, Homo sapiens
gagaaccaacaaagtcg

SEQ ID NO: 7647 - DNA, 17 bp, Homo sapiens
agaaccaacaaagtcga

SEQ ID NO: 7648 - DNA, 17 bp, Homo sapiens
gaaccaacaaagtcgaa

SEQ ID NO: 7649 - DNA, 17 bp, Homo sapiens
aaccaacaaagtcgaaa

SEQ ID NO: 7650 - DNA, 17 bp, Homo sapiens
accaacaaagtcgaaac

SEQ ID NO: 7651 - DNA, 17 bp, Homo sapiens
ccaacaaagtcgaaacc

SEQ ID NO: 7652 - DNA, 17 bp, Homo sapiens
caacaaagtcgaaacca

SEQ ID NO: 7653 - DNA, 17 bp, Homo sapiens
aacaaagtcgaaaccat

SEQ ID NO: 7654 - DNA, 17 bp, Homo sapiens
acaaagtcgaaaccatg

SEQ ID NO: 7655 - DNA, 17 bp, Homo sapiens
caaagtcgaaaccatga

SEQ ID NO: 7656 - DNA, 17 bp, Homo sapiens
aaagtcgaaaccatgag

SEQ ID NO: 7657 - DNA, 17 bp, Homo sapiens
aagtcgaaaccatgagc

SEQ ID NO: 7658 - DNA, 17 bp, Homo sapiens
agtcgaaaccatgagct

SEQ ID NO: 7659 - DNA, 17 bp, Homo sapiens
gtcgaaaccatgagctg

SEQ ID NO: 7660 - DNA, 17 bp, Homo sapiens
tcgaaaccatgagctgg

SEQ ID NO: 7661 - DNA, 17 bp, Homo sapiens
cgaaaccatgagctgga

SEQ ID NO: 7662 - DNA, 17 bp, Homo sapiens
gaaaccatgagctggag

SEQ ID NO: 7663 - DNA, 17 bp, Homo sapiens
aaaccatgagctggaga

SEQ ID NO: 7664 - DNA, 17 bp, Homo sapiens
aaccatgagctggagaa

SEQ ID NO: 7665 - DNA, 17 bp, Homo sapiens
accatgagctggagaag

SEQ ID NO: 7666 - DNA, 17 bp, Homo sapiens
ccatgagctggagaaga

SEQ ID NO: 7667 - DNA, 17 bp, Homo sapiens
catgagctggagaagaa

SEQ ID NO: 7668 - DNA, 17 bp, Homo sapiens
atgagctggagaagaag

SEQ ID NO: 7669 - DNA, 17 bp, Homo sapiens
tgagctggagaagaagc

SEQ ID NO: 7670 - DNA, 17 bp, Homo sapiens
gagctggagaagaagca

SEQ ID NO: 7671 - DNA, 17 bp, Homo sapiens
agctggagaagaagcag

SEQ ID NO: 7672 - DNA, 17 bp, Homo sapiens
gctggagaagaagcaga

SEQ ID NO: 7673 - DNA, 17 bp, Homo sapiens
ctggagaagaagcagaa

SEQ ID NO: 7674 - DNA, 17 bp, Homo sapiens
tggagaagaagcagaag

SEQ ID NO: 7675 - DNA, 17 bp, Homo sapiens
ggagaagaagcagaaga

SEQ ID NO: 7676 - DNA, 17 bp, Homo sapiens
gagaagaagcagaagaa

SEQ ID NO: 7677 - DNA, 17 bp, Homo sapiens
agaagaagcagaagaag

SEQ ID NO: 7678 - DNA, 17 bp, Homo sapiens
gaagaagcagaagaagt

SEQ ID NO: 7679 - DNA, 17 bp, Homo sapiens
aagaagcagaagaagtt

SEQ ID NO: 7680 - DNA, 17 bp, Homo sapiens
agaagcagaagaagttt

SEQ ID NO: 7681 - DNA, 17 bp, Homo sapiens
gaagcagaagaagtttg

SEQ ID NO: 7682 - DNA, 17 bp, Homo sapiens
aagcagaagaagtttga

SEQ ID NO: 7683 - DNA, 17 bp, Homo sapiens
agcagaagaagtttgac

SEQ ID NO: 7684 - DNA, 17 bp, Homo sapiens
gcagaagaagtttgacc

SEQ ID NO: 7685 - DNA, 17 bp, Homo sapiens
cagaagaagtttgacct

SEQ ID NO: 7686 - DNA, 17 bp, Homo sapiens
agaagaagtttgacctg

SEQ ID NO: 7687 - DNA, 17 bp, Homo sapiens
gaagaagtttgacctgc

SEQ ID NO: 7688 - DNA, 17 bp, Homo sapiens
aagaagtttgacctgca

SEQ ID NO: 7689 - DNA, 17 bp, Homo sapiens
agaagtttgacctgcag

SEQ ID NO: 7690 - DNA, 17 bp, Homo sapiens
gaagtttgacctgcagc

SEQ ID NO: 7691 - DNA, 17 bp, Homo sapiens
aagtttgacctgcagct

SEQ ID NO: 7692 - DNA, 17 bp, Homo sapiens
agtttgacctgcagctg

SEQ ID NO: 7693 - DNA, 17 bp, Homo sapiens
gtttgacctgcagctgg

SEQ ID NO: 7694 - DNA, 17 bp, Homo sapiens
tttgacctgcagctggc

SEQ ID NO: 7695 - DNA, 17 bp, Homo sapiens
ttgacctgcagctggcc

SEQ ID NO: 7696 - DNA, 17 bp, Homo sapiens
tgacctgcagctggccc

SEQ ID NO: 7697 - DNA, 17 bp, Homo sapiens
gacctgcagctggccca

SEQ ID NO: 7698 - DNA, 17 bp, Homo sapiens
acctgcagctggcccag

SEQ ID NO: 7699 - DNA, 17 bp, Homo sapiens
cctgcagctggcccagg

SEQ ID NO: 7700 - DNA, 17 bp, Homo sapiens
ctgcagctggcccaggc

SEQ ID NO: 7701 - DNA, 17 bp, Homo sapiens
tgcagctggcccaggcc

SEQ ID NO: 7702 - DNA, 17 bp, Homo sapiens
gcagctggcccaggccc

SEQ ID NO: 7703 - DNA, 17 bp, Homo sapiens
cagctggcccaggccct

SEQ ID NO: 7704 - DNA, 17 bp, Homo sapiens
agctggcccaggcccta

SEQ ID NO: 7705 - DNA, 17 bp, Homo sapiens
gctggcccaggccctag

SEQ ID NO: 7706 - DNA, 17 bp, Homo sapiens
ctggcccaggccctagg

SEQ ID NO: 7707 - DNA, 17 bp, Homo sapiens
tggcccaggccctaggt

SEQ ID NO: 7708 - DNA, 17 bp, Homo sapiens
ggcccaggccctaggtg

SEQ ID NO: 7709 - DNA, 17 bp, Homo sapiens
gcccaggccctaggtga

SEQ ID NO: 7710 - DNA, 17 bp, Homo sapiens
cccaggccctaggtgag

SEQ ID NO: 7711 - DNA, 17 bp, Homo sapiens
ccaggccctaggtgagt

SEQ ID NO: 7712 - DNA, 17 bp, Homo sapiens
caggccctaggtgagtc

SEQ ID NO: 7713 - DNA, 17 bp, Homo sapiens
aggccctaggtgagtca

SEQ ID NO: 7714 - DNA, 17 bp, Homo sapiens
ggccctaggtgagtcag

SEQ ID NO: 7715 - DNA, 17 bp, Homo sapiens
gccctaggtgagtcagt

SEQ ID NO: 7716 - DNA, 17 bp, Homo sapiens
ccctaggtgagtcagtg

SEQ ID NO: 7717 - DNA, 17 bp, Homo sapiens
cctaggtgagtcagtgt

SEQ ID NO: 7718 - DNA, 17 bp, Homo sapiens
ctaggtgagtcagtgtt

SEQ ID NO: 7719 - DNA, 17 bp, Homo sapiens
taggtgagtcagtgttt

SEQ ID NO: 7720 - DNA, 17 bp, Homo sapiens
aggtgagtcagtgtttg

SEQ ID NO: 7721 - DNA, 17 bp, Homo sapiens
ggtgagtcagtgtttga

SEQ ID NO: 7722 - DNA, 17 bp, Homo sapiens
gtgagtcagtgtttgag

SEQ ID NO: 7723 - DNA, 17 bp, Homo sapiens
tgagtcagtgtttgaga

SEQ ID NO: 7724 - DNA, 17 bp, Homo sapiens
gagtcagtgtttgagaa

SEQ ID NO: 7725 - DNA, 17 bp, Homo sapiens
agtcagtgtttgagaag

SEQ ID NO: 7726 - DNA, 17 bp, Homo sapiens
gtcagtgtttgagaagg

SEQ ID NO: 7727 - DNA, 17 bp, Homo sapiens
tcagtgtttgagaaggg

SEQ ID NO: 7728 - DNA, 17 bp, Homo sapiens
cagtgtttgagaagggt

SEQ ID NO: 7729 - DNA, 17 bp, Homo sapiens
agtgtttgagaagggtc

SEQ ID NO: 7730 - DNA, 17 bp, Homo sapiens
gtgtttgagaagggtct

SEQ ID NO: 7731 - DNA, 17 bp, Homo sapiens
tgtttgagaagggtctc

SEQ ID NO: 7732 - DNA, 17 bp, Homo sapiens
gtttgagaagggtctcc

SEQ ID NO: 7733 - DNA, 17 bp, Homo sapiens
tttgagaagggtctccg

SEQ ID NO: 7734 - DNA, 17 bp, Homo sapiens
ttgagaagggtctccgt

SEQ ID NO: 7735 - DNA, 17 bp, Homo sapiens
tgagaagggtctccgtg

SEQ ID NO: 7736 - DNA, 17 bp, Homo sapiens
gagaagggtctccgtga

SEQ ID NO: 7737 - DNA, 17 bp, Homo sapiens
agaagggtctccgtgag

SEQ ID NO: 7738 - DNA, 17 bp, Homo sapiens
gaagggtctccgtgaga

SEQ ID NO: 7739 - DNA, 17 bp, Homo sapiens
aagggtctccgtgagaa

SEQ ID NO: 7740 - DNA, 17 bp, Homo sapiens
agggtctccgtgagaaa

SEQ ID NO: 7741 - DNA, 17 bp, Homo sapiens
gggtctccgtgagaaag

SEQ ID NO: 7742 - DNA, 17 bp, Homo sapiens
ggtctccgtgagaaagt

SEQ ID NO: 7743 - DNA, 17 bp, Homo sapiens
gtctccgtgagaaagtg

SEQ ID NO: 7744 - DNA, 17 bp, Homo sapiens
tctccgtgagaaagtga

SEQ ID NO: 7745 - DNA, 17 bp, Homo sapiens
ctccgtgagaaagtgac

SEQ ID NO: 7746 - DNA, 17 bp, Homo sapiens
tccgtgagaaagtgacc

SEQ ID NO: 7747 - DNA, 17 bp, Homo sapiens
ccgtgagaaagtgaccc

SEQ ID NO: 7748 - DNA, 17 bp, Homo sapiens
cgtgagaaagtgaccca

SEQ ID NO: 7749 - DNA, 17 bp, Homo sapiens
gtgagaaagtgacccag

SEQ ID NO: 7750 - DNA, 17 bp, Homo sapiens
tgagaaagtgacccagg

SEQ ID NO: 7751 - DNA, 17 bp, Homo sapiens
gagaaagtgacccagga

SEQ ID NO: 7752 - DNA, 17 bp, Homo sapiens
agaaagtgacccaggag

SEQ ID NO: 7753 - DNA, 17 bp, Homo sapiens
gaaagtgacccaggaga

SEQ ID NO: 7754 - DNA, 17 bp, Homo sapiens
aaagtgacccaggagaa

SEQ ID NO: 7755 - DNA, 17 bp, Homo sapiens
aagtgacccaggagaac

SEQ ID NO: 7756 - DNA, 17 bp, Homo sapiens
agtgacccaggagaaca

SEQ ID NO: 7757 - DNA, 17 bp, Homo sapiens
gtgacccaggagaacac

SEQ ID NO: 7758 - DNA, 17 bp, Homo sapiens
tgacccaggagaacacc

SEQ ID NO: 7759 - DNA, 17 bp, Homo sapiens
gacccaggagaacacca

SEQ ID NO: 7760 - DNA, 17 bp, Homo sapiens
acccaggagaacaccag

SEQ ID NO: 7761 - DNA, 17 bp, Homo sapiens
cccaggagaacaccagt

SEQ ID NO: 7762 - DNA, 17 bp, Homo sapiens
ccaggagaacaccagtg

SEQ ID NO: 7763 - DNA, 17 bp, Homo sapiens
caggagaacaccagtgt

SEQ ID NO: 7764 - DNA, 17 bp, Homo sapiens
aggagaacaccagtgtc

SEQ ID NO: 7765 - DNA, 17 bp, Homo sapiens
ggagaacaccagtgtcc

SEQ ID NO: 7766 - DNA, 17 bp, Homo sapiens
gagaacaccagtgtccg

SEQ ID NO: 7767 - DNA, 17 bp, Homo sapiens
agaacaccagtgtccgg

SEQ ID NO: 7768 - DNA, 17 bp, Homo sapiens
gaacaccagtgtccggt

SEQ ID NO: 7769 - DNA, 17 bp, Homo sapiens
aacaccagtgtccggtg

SEQ ID NO: 7770 - DNA, 17 bp, Homo sapiens
acaccagtgtccggtgg

SEQ ID NO: 7771 - DNA, 17 bp, Homo sapiens
caccagtgtccggtggg

SEQ ID NO: 7772 - DNA, 17 bp, Homo sapiens
accagtgtccggtggga

SEQ ID NO: 7773 - DNA, 17 bp, Homo sapiens
ccagtgtccggtgggag

SEQ ID NO: 7774 - DNA, 17 bp, Homo sapiens
cagtgtccggtgggagc

SEQ ID NO: 7775 - DNA, 17 bp, Homo sapiens
agtgtccggtgggagct

SEQ ID NO: 7776 - DNA, 17 bp, Homo sapiens
gtgtccggtgggagcta

SEQ ID NO: 7777 - DNA, 17 bp, Homo sapiens
tgtccggtgggagctag

SEQ ID NO: 7778 - DNA, 17 bp, Homo sapiens
gtccggtgggagctagg

SEQ ID NO: 7779 - DNA, 17 bp, Homo sapiens
tccggtgggagctaggc

SEQ ID NO: 7780 - DNA, 17 bp, Homo sapiens
ccggtgggagctaggcc

SEQ ID NO: 7781 - DNA, 17 bp, Homo sapiens
cggtgggagctaggcca

SEQ ID NO: 7782 - DNA, 17 bp, Homo sapiens
ggtgggagctaggccag

SEQ ID NO: 7783 - DNA, 17 bp, Homo sapiens
gtgggagctaggccagc

SEQ ID NO: 7784 - DNA, 17 bp, Homo sapiens
tgggagctaggccagct

SEQ ID NO: 7785 - DNA, 17 bp, Homo sapiens
gggagctaggccagctt

SEQ ID NO: 7786 - DNA, 17 bp, Homo sapiens
ggagctaggccagcttc

SEQ ID NO: 7787 - DNA, 17 bp, Homo sapiens
gagctaggccagcttca

SEQ ID NO: 7788 - DNA, 17 bp, Homo sapiens
agctaggccagcttcag

SEQ ID NO: 7789 - DNA, 17 bp, Homo sapiens
gctaggccagcttcagc

SEQ ID NO: 7790 - DNA, 17 bp, Homo sapiens
ctaggccagcttcagca

SEQ ID NO: 7791 - DNA, 17 bp, Homo sapiens
taggccagcttcagcag

SEQ ID NO: 7792 - DNA, 17 bp, Homo sapiens
aggccagcttcagcagc

SEQ ID NO: 7793 - DNA, 17 bp, Homo sapiens
ggccagcttcagcagca

SEQ ID NO: 7794 - DNA, 17 bp, Homo sapiens
gccagcttcagcagcag

SEQ ID NO: 7795 - DNA, 17 bp, Homo sapiens
ccagcttcagcagcagc

SEQ ID NO: 7796 - DNA, 17 bp, Homo sapiens
cagcttcagcagcagct

SEQ ID NO: 7797 - DNA, 17 bp, Homo sapiens
agcttcagcagcagctg

SEQ ID NO: 7798 - DNA, 17 bp, Homo sapiens
gcttcagcagcagctga

SEQ ID NO: 7799 - DNA, 17 bp, Homo sapiens
cttcagcagcagctgaa

SEQ ID NO: 7800 - DNA, 17 bp, Homo sapiens
ttcagcagcagctgaag

SEQ ID NO: 7801 - DNA, 17 bp, Homo sapiens
tcagcagcagctgaagc

SEQ ID NO: 7802 - DNA, 17 bp, Homo sapiens
cagcagcagctgaagca

SEQ ID NO: 7803 - DNA, 17 bp, Homo sapiens
agcagcagctgaagcaa

SEQ ID NO: 7804 - DNA, 17 bp, Homo sapiens
gcagcagctgaagcaaa

SEQ ID NO: 7805 - DNA, 17 bp, Homo sapiens
cagcagctgaagcaaaa

SEQ ID NO: 7806 - DNA, 17 bp, Homo sapiens
agcagctgaagcaaaag

SEQ ID NO: 7807 - DNA, 17 bp, Homo sapiens
gcagctgaagcaaaagg

SEQ ID NO: 7808 - DNA, 17 bp, Homo sapiens
cagctgaagcaaaagga

SEQ ID NO: 7809 - DNA, 17 bp, Homo sapiens
agctgaagcaaaaggag

SEQ ID NO: 7810 - DNA, 17 bp, Homo sapiens
gctgaagcaaaaggagc

SEQ ID NO: 7811 - DNA, 17 bp, Homo sapiens
ctgaagcaaaaggagca

SEQ ID NO: 7812 - DNA, 17 bp, Homo sapiens
tgaagcaaaaggagcag

SEQ ID NO: 7813 - DNA, 17 bp, Homo sapiens
gaagcaaaaggagcagg

SEQ ID NO: 7814 - DNA, 17 bp, Homo sapiens
aagcaaaaggagcagga

SEQ ID NO: 7815 - DNA, 17 bp, Homo sapiens
agcaaaaggagcaggaa

SEQ ID NO: 7816 - DNA, 17 bp, Homo sapiens
gcaaaaggagcaggaag

SEQ ID NO: 7817 - DNA, 17 bp, Homo sapiens
caaaaggagcaggaagc

SEQ ID NO: 7818 - DNA, 17 bp, Homo sapiens
aaaaggagcaggaagcc

SEQ ID NO: 7819 - DNA, 17 bp, Homo sapiens
aaaggagcaggaagcct

SEQ ID NO: 7820 - DNA, 17 bp, Homo sapiens
aaggagcaggaagcctc

SEQ ID NO: 7821 - DNA, 17 bp, Homo sapiens
aggagcaggaagcctca

SEQ ID NO: 7822 - DNA, 17 bp, Homo sapiens
ggagcaggaagcctcac

SEQ ID NO: 7823 - DNA, 17 bp, Homo sapiens
gagcaggaagcctcaca

SEQ ID NO: 7824 - DNA, 17 bp, Homo sapiens
agcaggaagcctcacag

SEQ ID NO: 7825 - DNA, 17 bp, Homo sapiens
gcaggaagcctcacagc

SEQ ID NO: 7826 - DNA, 17 bp, Homo sapiens
caggaagcctcacagct

SEQ ID NO: 7827 - DNA, 17 bp, Homo sapiens
aggaagcctcacagctg

SEQ ID NO: 7828 - DNA, 17 bp, Homo sapiens
ggaagcctcacagctga

SEQ ID NO: 7829 - DNA, 17 bp, Homo sapiens
gaagcctcacagctgaa

SEQ ID NO: 7830 - DNA, 17 bp, Homo sapiens
aagcctcacagctgaag

SEQ ID NO: 7831 - DNA, 17 bp, Homo sapiens
agcctcacagctgaagc

SEQ ID NO: 7832 - DNA, 17 bp, Homo sapiens
gcctcacagctgaagca

SEQ ID NO: 7833 - DNA, 17 bp, Homo sapiens
cctcacagctgaagcag

SEQ ID NO: 7834 - DNA, 17 bp, Homo sapiens
ctcacagctgaagcagc

SEQ ID NO: 7835 - DNA, 17 bp, Homo sapiens
tcacagctgaagcagca

SEQ ID NO: 7836 - DNA, 17 bp, Homo sapiens
cacagctgaagcagcag

SEQ ID NO: 7837 - DNA, 17 bp, Homo sapiens
acagctgaagcagcagg

SEQ ID NO: 7838 - DNA, 17 bp, Homo sapiens
cagctgaagcagcaggt

SEQ ID NO: 7839 - DNA, 17 bp, Homo sapiens
agctgaagcagcaggtg

SEQ ID NO: 7840 - DNA, 17 bp, Homo sapiens
gctgaagcagcaggtgg

SEQ ID NO: 7841 - DNA, 17 bp, Homo sapiens
ctgaagcagcaggtgga

SEQ ID NO: 7842 - DNA, 17 bp, Homo sapiens
tgaagcagcaggtggag

SEQ ID NO: 7843 - DNA, 17 bp, Homo sapiens
gaagcagcaggtggaga

SEQ ID NO: 7844 - DNA, 17 bp, Homo sapiens
aagcagcaggtggagat

SEQ ID NO: 7845 - DNA, 17 bp, Homo sapiens
agcagcaggtggagatg

SEQ ID NO: 7846 - DNA, 17 bp, Homo sapiens
gcagcaggtggagatgc

SEQ ID NO: 7847 - DNA, 17 bp, Homo sapiens
cagcaggtggagatgct

SEQ ID NO: 7848 - DNA, 17 bp, Homo sapiens
agcaggtggagatgcta

SEQ ID NO: 7849 - DNA, 17 bp, Homo sapiens
gcaggtggagatgctac

SEQ ID NO: 7850 - DNA, 17 bp, Homo sapiens
caggtggagatgctaca

SEQ ID NO: 7851 - DNA, 17 bp, Homo sapiens
aggtggagatgctacag

SEQ ID NO: 7852 - DNA, 17 bp, Homo sapiens
ggtggagatgctacagg

SEQ ID NO: 7853 - DNA, 17 bp, Homo sapiens
gtggagatgctacagga

SEQ ID NO: 7854 - DNA, 17 bp, Homo sapiens
tggagatgctacaggac

SEQ ID NO: 7855 - DNA, 17 bp, Homo sapiens
ggagatgctacaggacc

SEQ ID NO: 7856 - DNA, 17 bp, Homo sapiens
gagatgctacaggacca

SEQ ID NO: 7857 - DNA, 17 bp, Homo sapiens
agatgctacaggaccat

SEQ ID NO: 7858 - DNA, 17 bp, Homo sapiens
gatgctacaggaccata

SEQ ID NO: 7859 - DNA, 17 bp, Homo sapiens
atgctacaggaccataa

SEQ ID NO: 7860 - DNA, 17 bp, Homo sapiens
tgctacaggaccataaa

SEQ ID NO: 7861 - DNA, 17 bp, Homo sapiens
gctacaggaccataaac

SEQ ID NO: 7862 - DNA, 17 bp, Homo sapiens
ctacaggaccataaacg

SEQ ID NO: 7863 - DNA, 17 bp, Homo sapiens
tacaggaccataaacgg

SEQ ID NO: 7864 - DNA, 17 bp, Homo sapiens
acaggaccataaacggg

SEQ ID NO: 7865 - DNA, 17 bp, Homo sapiens
caggaccataaacggga

SEQ ID NO: 7866 - DNA, 17 bp, Homo sapiens
aggaccataaacgggag

SEQ ID NO: 7867 - DNA, 17 bp, Homo sapiens
ggaccataaacgggagc

SEQ ID NO: 7868 - DNA, 17 bp, Homo sapiens
gaccataaacgggagct

SEQ ID NO: 7869 - DNA, 17 bp, Homo sapiens
accataaacgggagctg

SEQ ID NO: 7870 - DNA, 17 bp, Homo sapiens
ccataaacgggagctgc

SEQ ID NO: 7871 - DNA, 17 bp, Homo sapiens
cataaacgggagctgct

SEQ ID NO: 7872 - DNA, 17 bp, Homo sapiens
ataaacgggagctgctg

SEQ ID NO: 7873 - DNA, 17 bp, Homo sapiens
taaacgggagctgctgg

SEQ ID NO: 7874 - DNA, 17 bp, Homo sapiens
aaacgggagctgctggg

SEQ ID NO: 7875 - DNA, 17 bp, Homo sapiens
aacgggagctgctgggg

SEQ ID NO: 7876 - DNA, 17 bp, Homo sapiens
acgggagctgctggggt

SEQ ID NO: 7877 - DNA, 17 bp, Homo sapiens
cgggagctgctggggtc

SEQ ID NO: 7878 - DNA, 17 bp, Homo sapiens
gggagctgctggggtca

SEQ ID NO: 7879 - DNA, 17 bp, Homo sapiens
ggagctgctggggtcac

SEQ ID NO: 7880 - DNA, 17 bp, Homo sapiens
gagctgctggggtcacc

SEQ ID NO: 7881 - DNA, 17 bp, Homo sapiens
agctgctggggtcaccc

SEQ ID NO: 7882 - DNA, 17 bp, Homo sapiens
gctgctggggtcaccct

SEQ ID NO: 7883 - DNA, 17 bp, Homo sapiens
ctgctggggtcaccctc

SEQ ID NO: 7884 - DNA, 17 bp, Homo sapiens
tgctggggtcaccctct

SEQ ID NO: 7885 - DNA, 17 bp, Homo sapiens
gctggggtcaccctctc

SEQ ID NO: 7886 - DNA, 17 bp, Homo sapiens
ctggggtcaccctctct

SEQ ID NO: 7887 - DNA, 17 bp, Homo sapiens
tggggtcaccctctctg

SEQ ID NO: 7888 - DNA, 17 bp, Homo sapiens
ggggtcaccctctctgg

SEQ ID NO: 7889 - DNA, 17 bp, Homo sapiens
gggtcaccctctctggg

SEQ ID NO: 7890 - DNA, 17 bp, Homo sapiens
ggtcaccctctctgggg

SEQ ID NO: 7891 - DNA, 17 bp, Homo sapiens
gtcaccctctctggggg

SEQ ID NO: 7892 - DNA, 17 bp, Homo sapiens
tcaccctctctggggga

SEQ ID NO: 7893 - DNA, 17 bp, Homo sapiens
caccctctctgggggaa

SEQ ID NO: 7894 - DNA, 17 bp, Homo sapiens
accctctctgggggaaa

SEQ ID NO: 7895 - DNA, 17 bp, Homo sapiens
ccctctctgggggaaaa

SEQ ID NO: 7896 - DNA, 17 bp, Homo sapiens
cctctctgggggaaaat

SEQ ID NO: 7897 - DNA, 17 bp, Homo sapiens
ctctctgggggaaaatt

SEQ ID NO: 7898 - DNA, 17 bp, Homo sapiens
tctctgggggaaaattg

SEQ ID NO: 7899 - DNA, 17 bp, Homo sapiens
ctctgggggaaaattgc

SEQ ID NO: 7900 - DNA, 17 bp, Homo sapiens
tctgggggaaaattgcg

SEQ ID NO: 7901 - DNA, 17 bp, Homo sapiens
ctgggggaaaattgcgt

SEQ ID NO: 7902 - DNA, 17 bp, Homo sapiens
tgggggaaaattgcgtt

SEQ ID NO: 7903 - DNA, 17 bp, Homo sapiens
gggggaaaattgcgttg

SEQ ID NO: 7904 - DNA, 17 bp, Homo sapiens
ggggaaaattgcgttgc

SEQ ID NO: 7905 - DNA, 17 bp, Homo sapiens
gggaaaattgcgttgct

SEQ ID NO: 7906 - DNA, 17 bp, Homo sapiens
ggaaaattgcgttgctg

SEQ ID NO: 7907 - DNA, 17 bp, Homo sapiens
gaaaattgcgttgctgg

SEQ ID NO: 7908 - DNA, 17 bp, Homo sapiens
aaaattgcgttgctggc

SEQ ID NO: 7909 - DNA, 17 bp, Homo sapiens
aaattgcgttgctggct

SEQ ID NO: 7910 - DNA, 17 bp, Homo sapiens
aattgcgttgctggctt

SEQ ID NO: 7911 - DNA, 17 bp, Homo sapiens
attgcgttgctggcttg

SEQ ID NO: 7912 - DNA, 17 bp, Homo sapiens
ttgcgttgctggcttga

SEQ ID NO: 7913 - DNA, 17 bp, Homo sapiens
tgcgttgctggcttgaa

SEQ ID NO: 7914 - DNA, 17 bp, Homo sapiens
gcgttgctggcttgaag

SEQ ID NO: 7915 - DNA, 17 bp, Homo sapiens
cgttgctggcttgaagg

SEQ ID NO: 7916 - DNA, 17 bp, Homo sapiens
gttgctggcttgaagga

SEQ ID NO: 7917 - DNA, 17 bp, Homo sapiens
ttgctggcttgaaggag

SEQ ID NO: 7918 - DNA, 17 bp, Homo sapiens
tgctggcttgaaggaga

SEQ ID NO: 7919 - DNA, 17 bp, Homo sapiens
gctggcttgaaggagag

SEQ ID NO: 7920 - DNA, 17 bp, Homo sapiens
ctggcttgaaggagagg

SEQ ID NO: 7921 - DNA, 17 bp, Homo sapiens
tggcttgaaggagaggc

SEQ ID NO: 7922 - DNA, 17 bp, Homo sapiens
ggcttgaaggagaggct

SEQ ID NO: 7923 - DNA, 17 bp, Homo sapiens
gcttgaaggagaggctc

SEQ ID NO: 7924 - DNA, 17 bp, Homo sapiens
cttgaaggagaggctct

SEQ ID NO: 7925 - DNA, 17 bp, Homo sapiens
ttgaaggagaggctctg

SEQ ID NO: 7926 - DNA, 17 bp, Homo sapiens
tgaaggagaggctctgg

SEQ ID NO: 7927 - DNA, 17 bp, Homo sapiens
gaaggagaggctctgga

SEQ ID NO: 7928 - DNA, 17 bp, Homo sapiens
aaggagaggctctggaa

SEQ ID NO: 7929 - DNA, 17 bp, Homo sapiens
aggagaggctctggaag

SEQ ID NO: 7930 - DNA, 17 bp, Homo sapiens
ggagaggctctggaagt

SEQ ID NO: 7931 - DNA, 17 bp, Homo sapiens
gagaggctctggaagtt

SEQ ID NO: 7932 - DNA, 17 bp, Homo sapiens
agaggctctggaagttg

SEQ ID NO: 7933 - DNA, 17 bp, Homo sapiens
gaggctctggaagttgg

SEQ ID NO: 7934 - DNA, 17 bp, Homo sapiens
aggctctggaagttgga

SEQ ID NO: 7935 - DNA, 17 bp, Homo sapiens
ggctctggaagttggaa

SEQ ID NO: 7936 - DNA, 17 bp, Homo sapiens
gctctggaagttggaat

SEQ ID NO: 7937 - DNA, 17 bp, Homo sapiens
ctctggaagttggaatc

SEQ ID NO: 7938 - DNA, 17 bp, Homo sapiens
tctggaagttggaatcc

SEQ ID NO: 7939 - DNA, 17 bp, Homo sapiens
ctggaagttggaatcca

SEQ ID NO: 7940 - DNA, 17 bp, Homo sapiens
tggaagttggaatccag

SEQ ID NO: 7941 - DNA, 17 bp, Homo sapiens
ggaagttggaatccagc

SEQ ID NO: 7942 - DNA, 17 bp, Homo sapiens
gaagttggaatccagcg

SEQ ID NO: 7943 - DNA, 17 bp, Homo sapiens
aagttggaatccagcgc

SEQ ID NO: 7944 - DNA, 17 bp, Homo sapiens
agttggaatccagcgcc

SEQ ID NO: 7945 - DNA, 17 bp, Homo sapiens
gttggaatccagcgccc

SEQ ID NO: 7946 - DNA, 17 bp, Homo sapiens
ttggaatccagcgccct

SEQ ID NO: 7947 - DNA, 17 bp, Homo sapiens
tggaatccagcgccctt

SEQ ID NO: 7948 - DNA, 17 bp, Homo sapiens
ggaatccagcgcccttg

SEQ ID NO: 7949 - DNA, 17 bp, Homo sapiens
gaatccagcgcccttga

SEQ ID NO: 7950 - DNA, 17 bp, Homo sapiens
aatccagcgcccttgag

SEQ ID NO: 7951 - DNA, 17 bp, Homo sapiens
atccagcgcccttgagc

SEQ ID NO: 7952 - DNA, 17 bp, Homo sapiens
tccagcgcccttgagca

SEQ ID NO: 7953 - DNA, 17 bp, Homo sapiens
ccagcgcccttgagcaa

SEQ ID NO: 7954 - DNA, 17 bp, Homo sapiens
cagcgcccttgagcaac

SEQ ID NO: 7955 - DNA, 17 bp, Homo sapiens
agcgcccttgagcaaca

SEQ ID NO: 7956 - DNA, 17 bp, Homo sapiens
gcgcccttgagcaacag

SEQ ID NO: 7957 - DNA, 17 bp, Homo sapiens
cgcccttgagcaacaga

SEQ ID NO: 7958 - DNA, 17 bp, Homo sapiens
gcccttgagcaacagaa

SEQ ID NO: 7959 - DNA, 17 bp, Homo sapiens
cccttgagcaacagaaa

SEQ ID NO: 7960 - DNA, 17 bp, Homo sapiens
ccttgagcaacagaaaa

SEQ ID NO: 7961 - DNA, 17 bp, Homo sapiens
cttgagcaacagaaaat

SEQ ID NO: 7962 - DNA, 17 bp, Homo sapiens
ttgagcaacagaaaatc

SEQ ID NO: 7963 - DNA, 17 bp, Homo sapiens
tgagcaacagaaaatcc

SEQ ID NO: 7964 - DNA, 17 bp, Homo sapiens
gagcaacagaaaatcca

SEQ ID NO: 7965 - DNA, 17 bp, Homo sapiens
agcaacagaaaatccag

SEQ ID NO: 7966 - DNA, 17 bp, Homo sapiens
gcaacagaaaatccaga

SEQ ID NO: 7967 - DNA, 17 bp, Homo sapiens
caacagaaaatccagag

SEQ ID NO: 7968 - DNA, 17 bp, Homo sapiens
aacagaaaatccagagc

SEQ ID NO: 7969 - DNA, 17 bp, Homo sapiens
acagaaaatccagagcc

SEQ ID NO: 7970 - DNA, 17 bp, Homo sapiens
cagaaaatccagagcca

SEQ ID NO: 7971 - DNA, 17 bp, Homo sapiens
agaaaatccagagccag

SEQ ID NO: 7972 - DNA, 17 bp, Homo sapiens
gaaaatccagagccagc

SEQ ID NO: 7973 - DNA, 17 bp, Homo sapiens
aaaatccagagccagca

SEQ ID NO: 7974 - DNA, 17 bp, Homo sapiens
aaatccagagccagcag

SEQ ID NO: 7975 - DNA, 17 bp, Homo sapiens
aatccagagccagcagg

SEQ ID NO: 7976 - DNA, 17 bp, Homo sapiens
atccagagccagcagga

SEQ ID NO: 7977 - DNA, 17 bp, Homo sapiens
tccagagccagcaggaa

SEQ ID NO: 7978 - DNA, 17 bp, Homo sapiens
ccagagccagcaggaaa

SEQ ID NO: 7979 - DNA, 17 bp, Homo sapiens
cagagccagcaggaaaa

SEQ ID NO: 7980 - DNA, 17 bp, Homo sapiens
agagccagcaggaaaac

SEQ ID NO: 7981 - DNA, 17 bp, Homo sapiens
gagccagcaggaaaaca

SEQ ID NO: 7982 - DNA, 17 bp, Homo sapiens
agccagcaggaaaacac

SEQ ID NO: 7983 - DNA, 17 bp, Homo sapiens
gccagcaggaaaacacc

SEQ ID NO: 7984 - DNA, 17 bp, Homo sapiens
ccagcaggaaaacacca

SEQ ID NO: 7985 - DNA, 17 bp, Homo sapiens
cagcaggaaaacaccat

SEQ ID NO: 7986 - DNA, 17 bp, Homo sapiens
agcaggaaaacaccatc

SEQ ID NO: 7987 - DNA, 17 bp, Homo sapiens
gcaggaaaacaccatca

SEQ ID NO: 7988 - DNA, 17 bp, Homo sapiens
caggaaaacaccatcaa

SEQ ID NO: 7989 - DNA, 17 bp, Homo sapiens
aggaaaacaccatcaag

SEQ ID NO: 7990 - DNA, 17 bp, Homo sapiens
ggaaaacaccatcaagc

SEQ ID NO: 7991 - DNA, 17 bp, Homo sapiens
gaaaacaccatcaagca

SEQ ID NO: 7992 - DNA, 17 bp, Homo sapiens
aaaacaccatcaagcag

SEQ ID NO: 7993 - DNA, 17 bp, Homo sapiens
aaacaccatcaagcagc

SEQ ID NO: 7994 - DNA, 17 bp, Homo sapiens
aacaccatcaagcagct

SEQ ID NO: 7995 - DNA, 17 bp, Homo sapiens
acaccatcaagcagctg

SEQ ID NO: 7996 - DNA, 17 bp, Homo sapiens
caccatcaagcagctgg

SEQ ID NO: 7997 - DNA, 17 bp, Homo sapiens
accatcaagcagctgga

SEQ ID NO: 7998 - DNA, 17 bp, Homo sapiens
ccatcaagcagctggag

SEQ ID NO: 7999 - DNA, 17 bp, Homo sapiens
catcaagcagctggagc

SEQ ID NO: 8000 - DNA, 17 bp, Homo sapiens
atcaagcagctggagca

SEQ ID NO: 8001 - DNA, 17 bp, Homo sapiens
tcaagcagctggagcag

SEQ ID NO: 8002 - DNA, 17 bp, Homo sapiens
caagcagctggagcagc

SEQ ID NO: 8003 - DNA, 17 bp, Homo sapiens
aagcagctggagcagct

SEQ ID NO: 8004 - DNA, 17 bp, Homo sapiens
agcagctggagcagctc

SEQ ID NO: 8005 - DNA, 17 bp, Homo sapiens
gcagctggagcagctcc

SEQ ID NO: 8006 - DNA, 17 bp, Homo sapiens
cagctggagcagctccg

SEQ ID NO: 8007 - DNA, 17 bp, Homo sapiens
agctggagcagctccgc

SEQ ID NO: 8008 - DNA, 17 bp, Homo sapiens
gctggagcagctccgcc

SEQ ID NO: 8009 - DNA, 17 bp, Homo sapiens
ctggagcagctccgcca

SEQ ID NO: 8010 - DNA, 17 bp, Homo sapiens
tggagcagctccgccag

SEQ ID NO: 8011 - DNA, 17 bp, Homo sapiens
ggagcagctccgccagc

SEQ ID NO: 8012 - DNA, 17 bp, Homo sapiens
gagcagctccgccagcg

SEQ ID NO: 8013 - DNA, 17 bp, Homo sapiens
agcagctccgccagcgg

SEQ ID NO: 8014 - DNA, 17 bp, Homo sapiens
gcagctccgccagcggt

SEQ ID NO: 8015 - DNA, 17 bp, Homo sapiens
cagctccgccagcggtt

SEQ ID NO: 8016 - DNA, 17 bp, Homo sapiens
agctccgccagcggttt

SEQ ID NO: 8017 - DNA, 17 bp, Homo sapiens
gctccgccagcggtttg

SEQ ID NO: 8018 - DNA, 17 bp, Homo sapiens
ctccgccagcggtttga

SEQ ID NO: 8019 - DNA, 17 bp, Homo sapiens
tccgccagcggtttgag

SEQ ID NO: 8020 - DNA, 17 bp, Homo sapiens
ccgccagcggtttgagc

SEQ ID NO: 8021 - DNA, 17 bp, Homo sapiens
cgccagcggtttgagct

SEQ ID NO: 8022 - DNA, 17 bp, Homo sapiens
gccagcggtttgagctg

SEQ ID NO: 8023 - DNA, 17 bp, Homo sapiens
ccagcggtttgagctgg

SEQ ID NO: 8024 - DNA, 17 bp, Homo sapiens
cagcggtttgagctgga

SEQ ID NO: 8025 - DNA, 17 bp, Homo sapiens
agcggtttgagctggag

SEQ ID NO: 8026 - DNA, 17 bp, Homo sapiens
gcggtttgagctggaga

SEQ ID NO: 8027 - DNA, 17 bp, Homo sapiens
cggtttgagctggagat

SEQ ID NO: 8028 - DNA, 17 bp, Homo sapiens
ggtttgagctggagatc

SEQ ID NO: 8029 - DNA, 17 bp, Homo sapiens
gtttgagctggagatcg

SEQ ID NO: 8030 - DNA, 17 bp, Homo sapiens
tttgagctggagatcga

SEQ ID NO: 8031 - DNA, 17 bp, Homo sapiens
ttgagctggagatcgag

SEQ ID NO: 8032 - DNA, 17 bp, Homo sapiens
tgagctggagatcgagc

SEQ ID NO: 8033 - DNA, 17 bp, Homo sapiens
gagctggagatcgagcg

SEQ ID NO: 8034 - DNA, 17 bp, Homo sapiens
agctggagatcgagcgg

SEQ ID NO: 8035 - DNA, 17 bp, Homo sapiens
gctggagatcgagcgga

SEQ ID NO: 8036 - DNA, 17 bp, Homo sapiens
ctggagatcgagcggat

SEQ ID NO: 8037 - DNA, 17 bp, Homo sapiens
tggagatcgagcggatg

SEQ ID NO: 8038 - DNA, 17 bp, Homo sapiens
ggagatcgagcggatga

SEQ ID NO: 8039 - DNA, 17 bp, Homo sapiens
gagatcgagcggatgaa

SEQ ID NO: 8040 - DNA, 17 bp, Homo sapiens
agatcgagcggatgaag

SEQ ID NO: 8041 - DNA, 17 bp, Homo sapiens
gatcgagcggatgaagc

SEQ ID NO: 8042 - DNA, 17 bp, Homo sapiens
atcgagcggatgaagca

SEQ ID NO: 8043 - DNA, 17 bp, Homo sapiens
tcgagcggatgaagcag

SEQ ID NO: 8044 - DNA, 17 bp, Homo sapiens
cgagcggatgaagcaga

SEQ ID NO: 8045 - DNA, 17 bp, Homo sapiens
gagcggatgaagcagat

SEQ ID NO: 8046 - DNA, 17 bp, Homo sapiens
agcggatgaagcagatg

SEQ ID NO: 8047 - DNA, 17 bp, Homo sapiens
gcggatgaagcagatgc

SEQ ID NO: 8048 - DNA, 17 bp, Homo sapiens
cggatgaagcagatgca

SEQ ID NO: 8049 - DNA, 17 bp, Homo sapiens
ggatgaagcagatgcac

SEQ ID NO: 8050 - DNA, 17 bp, Homo sapiens
gatgaagcagatgcacc

SEQ ID NO: 8051 - DNA, 17 bp, Homo sapiens
atgaagcagatgcacca

SEQ ID NO: 8052 - DNA, 17 bp, Homo sapiens
tgaagcagatgcaccag

SEQ ID NO: 8053 - DNA, 17 bp, Homo sapiens
gaagcagatgcaccaga

SEQ ID NO: 8054 - DNA, 17 bp, Homo sapiens
aagcagatgcaccagaa

SEQ ID NO: 8055 - DNA, 17 bp, Homo sapiens
agcagatgcaccagaag

SEQ ID NO: 8056 - DNA, 17 bp, Homo sapiens
gcagatgcaccagaagg

SEQ ID NO: 8057 - DNA, 17 bp, Homo sapiens
cagatgcaccagaagga

SEQ ID NO: 8058 - DNA, 17 bp, Homo sapiens
agatgcaccagaaggac

SEQ ID NO: 8059 - DNA, 17 bp, Homo sapiens
gatgcaccagaaggacc

SEQ ID NO: 8060 - DNA, 17 bp, Homo sapiens
atgcaccagaaggaccg

SEQ ID NO: 8061 - DNA, 17 bp, Homo sapiens
tgcaccagaaggaccgt

SEQ ID NO: 8062 - DNA, 17 bp, Homo sapiens
gcaccagaaggaccgtg

SEQ ID NO: 8063 - DNA, 17 bp, Homo sapiens
caccagaaggaccgtga

SEQ ID NO: 8064 - DNA, 17 bp, Homo sapiens
accagaaggaccgtgag

SEQ ID NO: 8065 - DNA, 17 bp, Homo sapiens
ccagaaggaccgtgagg

SEQ ID NO: 8066 - DNA, 17 bp, Homo sapiens
cagaaggaccgtgagga

SEQ ID NO: 8067 - DNA, 17 bp, Homo sapiens
agaaggaccgtgaggac

SEQ ID NO: 8068 - DNA, 17 bp, Homo sapiens
gaaggaccgtgaggacc

SEQ ID NO: 8069 - DNA, 17 bp, Homo sapiens
aaggaccgtgaggacca

SEQ ID NO: 8070 - DNA, 17 bp, Homo sapiens
aggaccgtgaggaccag

SEQ ID NO: 8071 - DNA, 17 bp, Homo sapiens
ggaccgtgaggaccagg

SEQ ID NO: 8072 - DNA, 17 bp, Homo sapiens
gaccgtgaggaccagga

SEQ ID NO: 8073 - DNA, 17 bp, Homo sapiens
accgtgaggaccaggag

SEQ ID NO: 8074 - DNA, 17 bp, Homo sapiens
ccgtgaggaccaggagg

SEQ ID NO: 8075 - DNA, 17 bp, Homo sapiens
cgtgaggaccaggagga

SEQ ID NO: 8076 - DNA, 17 bp, Homo sapiens
gtgaggaccaggaggag

SEQ ID NO: 8077 - DNA, 17 bp, Homo sapiens
tgaggaccaggaggagg

SEQ ID NO: 8078 - DNA, 17 bp, Homo sapiens
gaggaccaggaggagga

SEQ ID NO: 8079 - DNA, 17 bp, Homo sapiens
aggaccaggaggaggaa

SEQ ID NO: 8080 - DNA, 17 bp, Homo sapiens
ggaccaggaggaggaac

SEQ ID NO: 8081 - DNA, 17 bp, Homo sapiens
gaccaggaggaggaact

SEQ ID NO: 8082 - DNA, 17 bp, Homo sapiens
accaggaggaggaactg

SEQ ID NO: 8083 - DNA, 17 bp, Homo sapiens
ccaggaggaggaactgg

SEQ ID NO: 8084 - DNA, 17 bp, Homo sapiens
caggaggaggaactgga

SEQ ID NO: 8085 - DNA, 17 bp, Homo sapiens
aggaggaggaactggag

SEQ ID NO: 8086 - DNA, 17 bp, Homo sapiens
ggaggaggaactggagg

SEQ ID NO: 8087 - DNA, 17 bp, Homo sapiens
gaggaggaactggagga

SEQ ID NO: 8088 - DNA, 17 bp, Homo sapiens
aggaggaactggaggat

SEQ ID NO: 8089 - DNA, 17 bp, Homo sapiens
ggaggaactggaggatg

SEQ ID NO: 8090 - DNA, 17 bp, Homo sapiens
gaggaactggaggatgt

SEQ ID NO: 8091 - DNA, 17 bp, Homo sapiens
aggaactggaggatgtc

SEQ ID NO: 8092 - DNA, 17 bp, Homo sapiens
ggaactggaggatgtcc

SEQ ID NO: 8093 - DNA, 17 bp, Homo sapiens
gaactggaggatgtccg

SEQ ID NO: 8094 - DNA, 17 bp, Homo sapiens
aactggaggatgtccgt

SEQ ID NO: 8095 - DNA, 17 bp, Homo sapiens
actggaggatgtccgtc

SEQ ID NO: 8096 - DNA, 17 bp, Homo sapiens
ctggaggatgtccgtca

SEQ ID NO: 8097 - DNA, 17 bp, Homo sapiens
tggaggatgtccgtcag

SEQ ID NO: 8098 - DNA, 17 bp, Homo sapiens
ggaggatgtccgtcagt

SEQ ID NO: 8099 - DNA, 17 bp, Homo sapiens
gaggatgtccgtcagtc

SEQ ID NO: 8100 - DNA, 17 bp, Homo sapiens
aggatgtccgtcagtcc

SEQ ID NO: 8101 - DNA, 17 bp, Homo sapiens
ggatgtccgtcagtcct

SEQ ID NO: 8102 - DNA, 17 bp, Homo sapiens
gatgtccgtcagtcctg

SEQ ID NO: 8103 - DNA, 17 bp, Homo sapiens
atgtccgtcagtcctgc

SEQ ID NO: 8104 - DNA, 17 bp, Homo sapiens
tgtccgtcagtcctgcc

SEQ ID NO: 8105 - DNA, 17 bp, Homo sapiens
gtccgtcagtcctgcca

SEQ ID NO: 8106 - DNA, 17 bp, Homo sapiens
tccgtcagtcctgccag

SEQ ID NO: 8107 - DNA, 17 bp, Homo sapiens
ccgtcagtcctgccaga

SEQ ID NO: 8108 - DNA, 17 bp, Homo sapiens
cgtcagtcctgccagaa

SEQ ID NO: 8109 - DNA, 17 bp, Homo sapiens
gtcagtcctgccagaag

SEQ ID NO: 8110 - DNA, 17 bp, Homo sapiens
tcagtcctgccagaagc

SEQ ID NO: 8111 - DNA, 17 bp, Homo sapiens
cagtcctgccagaagcg

SEQ ID NO: 8112 - DNA, 17 bp, Homo sapiens
agtcctgccagaagcgg

SEQ ID NO: 8113 - DNA, 17 bp, Homo sapiens
gtcctgccagaagcggc

SEQ ID NO: 8114 - DNA, 17 bp, Homo sapiens
tcctgccagaagcggct

SEQ ID NO: 8115 - DNA, 17 bp, Homo sapiens
cctgccagaagcggctt

SEQ ID NO: 8116 - DNA, 17 bp, Homo sapiens
ctgccagaagcggcttc

SEQ ID NO: 8117 - DNA, 17 bp, Homo sapiens
tgccagaagcggcttca

SEQ ID NO: 8118 - DNA, 17 bp, Homo sapiens
gccagaagcggcttcat

SEQ ID NO: 8119 - DNA, 17 bp, Homo sapiens
ccagaagcggcttcatc

SEQ ID NO: 8120 - DNA, 17 bp, Homo sapiens
cagaagcggcttcatca

SEQ ID NO: 8121 - DNA, 17 bp, Homo sapiens
agaagcggcttcatcag

SEQ ID NO: 8122 - DNA, 17 bp, Homo sapiens
gaagcggcttcatcagc

SEQ ID NO: 8123 - DNA, 17 bp, Homo sapiens
aagcggcttcatcagct

SEQ ID NO: 8124 - DNA, 17 bp, Homo sapiens
agcggcttcatcagctg

SEQ ID NO: 8125 - DNA, 17 bp, Homo sapiens
gcggcttcatcagctgg

SEQ ID NO: 8126 - DNA, 17 bp, Homo sapiens
cggcttcatcagctgga

SEQ ID NO: 8127 - DNA, 17 bp, Homo sapiens
ggcttcatcagctggaa

SEQ ID NO: 8128 - DNA, 17 bp, Homo sapiens
gcttcatcagctggaaa

SEQ ID NO: 8129 - DNA, 17 bp, Homo sapiens
cttcatcagctggaaat

SEQ ID NO: 8130 - DNA, 17 bp, Homo sapiens
ttcatcagctggaaatg

SEQ ID NO: 8131 - DNA, 17 bp, Homo sapiens
tcatcagctggaaatgc

SEQ ID NO: 8132 - DNA, 17 bp, Homo sapiens
catcagctggaaatgca

SEQ ID NO: 8133 - DNA, 17 bp, Homo sapiens
atcagctggaaatgcag

SEQ ID NO: 8134 - DNA, 17 bp, Homo sapiens
tcagctggaaatgcagc

SEQ ID NO: 8135 - DNA, 17 bp, Homo sapiens
cagctggaaatgcagct

SEQ ID NO: 8136 - DNA, 17 bp, Homo sapiens
agctggaaatgcagctg

SEQ ID NO: 8137 - DNA, 17 bp, Homo sapiens
gctggaaatgcagctgg

SEQ ID NO: 8138 - DNA, 17 bp, Homo sapiens
ctggaaatgcagctgga

SEQ ID NO: 8139 - DNA, 17 bp, Homo sapiens
tggaaatgcagctggag

SEQ ID NO: 8140 - DNA, 17 bp, Homo sapiens
ggaaatgcagctggagc

SEQ ID NO: 8141 - DNA, 17 bp, Homo sapiens
gaaatgcagctggagca

SEQ ID NO: 8142 - DNA, 17 bp, Homo sapiens
aaatgcagctggagcaa

SEQ ID NO: 8143 - DNA, 17 bp, Homo sapiens
aatgcagctggagcaag

SEQ ID NO: 8144 - DNA, 17 bp, Homo sapiens
atgcagctggagcaaga

SEQ ID NO: 8145 - DNA, 17 bp, Homo sapiens
tgcagctggagcaagag

SEQ ID NO: 8146 - DNA, 17 bp, Homo sapiens
gcagctggagcaagagt

SEQ ID NO: 8147 - DNA, 17 bp, Homo sapiens
cagctggagcaagagta

SEQ ID NO: 8148 - DNA, 17 bp, Homo sapiens
agctggagcaagagtat

SEQ ID NO: 8149 - DNA, 17 bp, Homo sapiens
gctggagcaagagtatg

SEQ ID NO: 8150 - DNA, 17 bp, Homo sapiens
ctggagcaagagtatga

SEQ ID NO: 8151 - DNA, 17 bp, Homo sapiens
tggagcaagagtatgaa

SEQ ID NO: 8152 - DNA, 17 bp, Homo sapiens
ggagcaagagtatgaag

SEQ ID NO: 8153 - DNA, 17 bp, Homo sapiens
gagcaagagtatgaaga

SEQ ID NO: 8154 - DNA, 17 bp, Homo sapiens
agcaagagtatgaagag

SEQ ID NO: 8155 - DNA, 17 bp, Homo sapiens
gcaagagtatgaagaga

SEQ ID NO: 8156 - DNA, 17 bp, Homo sapiens
caagagtatgaagagaa

SEQ ID NO: 8157 - DNA, 17 bp, Homo sapiens
aagagtatgaagagaag

SEQ ID NO: 8158 - DNA, 17 bp, Homo sapiens
agagtatgaagagaagc

SEQ ID NO: 8159 - DNA, 17 bp, Homo sapiens
gagtatgaagagaagca

SEQ ID NO: 8160 - DNA, 17 bp, Homo sapiens
agtatgaagagaagcag

SEQ ID NO: 8161 - DNA, 17 bp, Homo sapiens
gtatgaagagaagcaga

SEQ ID NO: 8162 - DNA, 17 bp, Homo sapiens
tatgaagagaagcagat

SEQ ID NO: 8163 - DNA, 17 bp, Homo sapiens
atgaagagaagcagatg

SEQ ID NO: 8164 - DNA, 17 bp, Homo sapiens
tgaagagaagcagatgg

SEQ ID NO: 8165 - DNA, 17 bp, Homo sapiens
gaagagaagcagatggt

SEQ ID NO: 8166 - DNA, 17 bp, Homo sapiens
aagagaagcagatggtc

SEQ ID NO: 8167 - DNA, 17 bp, Homo sapiens
agagaagcagatggtcc

SEQ ID NO: 8168 - DNA, 17 bp, Homo sapiens
gagaagcagatggtcct

SEQ ID NO: 8169 - DNA, 17 bp, Homo sapiens
agaagcagatggtcctc

SEQ ID NO: 8170 - DNA, 17 bp, Homo sapiens
gaagcagatggtcctcc

SEQ ID NO: 8171 - DNA, 17 bp, Homo sapiens
aagcagatggtcctcca

SEQ ID NO: 8172 - DNA, 17 bp, Homo sapiens
agcagatggtcctccat

SEQ ID NO: 8173 - DNA, 17 bp, Homo sapiens
gcagatggtcctccatg

SEQ ID NO: 8174 - DNA, 17 bp, Homo sapiens
cagatggtcctccatga

SEQ ID NO: 8175 - DNA, 17 bp, Homo sapiens
agatggtcctccatgag

SEQ ID NO: 8176 - DNA, 17 bp, Homo sapiens
gatggtcctccatgaga

SEQ ID NO: 8177 - DNA, 17 bp, Homo sapiens
atggtcctccatgagaa

SEQ ID NO: 8178 - DNA, 17 bp, Homo sapiens
tggtcctccatgagaag

SEQ ID NO: 8179 - DNA, 17 bp, Homo sapiens
ggtcctccatgagaagc

SEQ ID NO: 8180 - DNA, 17 bp, Homo sapiens
gtcctccatgagaagca

SEQ ID NO: 8181 - DNA, 17 bp, Homo sapiens
tcctccatgagaagcaa

SEQ ID NO: 8182 - DNA, 17 bp, Homo sapiens
cctccatgagaagcaag

SEQ ID NO: 8183 - DNA, 17 bp, Homo sapiens
ctccatgagaagcaaga

SEQ ID NO: 8184 - DNA, 17 bp, Homo sapiens
tccatgagaagcaagat

SEQ ID NO: 8185 - DNA, 17 bp, Homo sapiens
ccatgagaagcaagatt

SEQ ID NO: 8186 - DNA, 17 bp, Homo sapiens
catgagaagcaagattt

SEQ ID NO: 8187 - DNA, 17 bp, Homo sapiens
atgagaagcaagatttg

SEQ ID NO: 8188 - DNA, 17 bp, Homo sapiens
tgagaagcaagatttgg

SEQ ID NO: 8189 - DNA, 17 bp, Homo sapiens
gagaagcaagatttgga

SEQ ID NO: 8190 - DNA, 17 bp, Homo sapiens
agaagcaagatttggaa

SEQ ID NO: 8191 - DNA, 17 bp, Homo sapiens
gaagcaagatttggaag

SEQ ID NO: 8192 - DNA, 17 bp, Homo sapiens
aagcaagatttggaagg

SEQ ID NO: 8193 - DNA, 17 bp, Homo sapiens
agcaagatttggaaggc

SEQ ID NO: 8194 - DNA, 17 bp, Homo sapiens
gcaagatttggaaggct

SEQ ID NO: 8195 - DNA, 17 bp, Homo sapiens
caagatttggaaggctt

SEQ ID NO: 8196 - DNA, 17 bp, Homo sapiens
aagatttggaaggcttg

SEQ ID NO: 8197 - DNA, 17 bp, Homo sapiens
agatttggaaggcttga

SEQ ID NO: 8198 - DNA, 17 bp, Homo sapiens
gatttggaaggcttgat

SEQ ID NO: 8199 - DNA, 17 bp, Homo sapiens
atttggaaggcttgatc

SEQ ID NO: 8200 - DNA, 17 bp, Homo sapiens
tttggaaggcttgatcg

SEQ ID NO: 8201 - DNA, 17 bp, Homo sapiens
ttggaaggcttgatcgg

SEQ ID NO: 8202 - DNA, 17 bp, Homo sapiens
tggaaggcttgatcgga

SEQ ID NO: 8203 - DNA, 17 bp, Homo sapiens
ggaaggcttgatcggaa

SEQ ID NO: 8204 - DNA, 17 bp, Homo sapiens
gaaggcttgatcggaac

SEQ ID NO: 8205 - DNA, 17 bp, Homo sapiens
aaggcttgatcggaacc

SEQ ID NO: 8206 - DNA, 17 bp, Homo sapiens
aggcttgatcggaaccc

SEQ ID NO: 8207 - DNA, 17 bp, Homo sapiens
ggcttgatcggaaccct

SEQ ID NO: 8208 - DNA, 17 bp, Homo sapiens
gcttgatcggaaccctc

SEQ ID NO: 8209 - DNA, 17 bp, Homo sapiens
cttgatcggaaccctct

SEQ ID NO: 8210 - DNA, 17 bp, Homo sapiens
ttgatcggaaccctctg

SEQ ID NO: 8211 - DNA, 17 bp, Homo sapiens
tgatcggaaccctctgt

SEQ ID NO: 8212 - DNA, 17 bp, Homo sapiens
gatcggaaccctctgtg

SEQ ID NO: 8213 - DNA, 17 bp, Homo sapiens
atcggaaccctctgtga

SEQ ID NO: 8214 - DNA, 17 bp, Homo sapiens
tcggaaccctctgtgac

SEQ ID NO: 8215 - DNA, 17 bp, Homo sapiens
cggaaccctctgtgacc

SEQ ID NO: 8216 - DNA, 17 bp, Homo sapiens
ggaaccctctgtgacca

SEQ ID NO: 8217 - DNA, 17 bp, Homo sapiens
gaaccctctgtgaccag

SEQ ID NO: 8218 - DNA, 17 bp, Homo sapiens
aaccctctgtgaccaga

SEQ ID NO: 8219 - DNA, 17 bp, Homo sapiens
accctctgtgaccagat

SEQ ID NO: 8220 - DNA, 17 bp, Homo sapiens
ccctctgtgaccagatt

SEQ ID NO: 8221 - DNA, 17 bp, Homo sapiens
cctctgtgaccagattg

SEQ ID NO: 8222 - DNA, 17 bp, Homo sapiens
ctctgtgaccagattgg

SEQ ID NO: 8223 - DNA, 17 bp, Homo sapiens
tctgtgaccagattggc

SEQ ID NO: 8224 - DNA, 17 bp, Homo sapiens
ctgtgaccagattggcc

SEQ ID NO: 8225 - DNA, 17 bp, Homo sapiens
tgtgaccagattggcca

SEQ ID NO: 8226 - DNA, 17 bp, Homo sapiens
gtgaccagattggccat

SEQ ID NO: 8227 - DNA, 17 bp, Homo sapiens
tgaccagattggccatc

SEQ ID NO: 8228 - DNA, 17 bp, Homo sapiens
gaccagattggccatcg

SEQ ID NO: 8229 - DNA, 17 bp, Homo sapiens
accagattggccatcgg

SEQ ID NO: 8230 - DNA, 17 bp, Homo sapiens
ccagattggccatcggg

SEQ ID NO: 8231 - DNA, 17 bp, Homo sapiens
cagattggccatcggga

SEQ ID NO: 8232 - DNA, 17 bp, Homo sapiens
agattggccatcgggac

SEQ ID NO: 8233 - DNA, 17 bp, Homo sapiens
gattggccatcgggact

SEQ ID NO: 8234 - DNA, 17 bp, Homo sapiens
attggccatcgggactt

SEQ ID NO: 8235 - DNA, 17 bp, Homo sapiens
ttggccatcgggacttt

SEQ ID NO: 8236 - DNA, 17 bp, Homo sapiens
tggccatcgggactttg

SEQ ID NO: 8237 - DNA, 17 bp, Homo sapiens
ggccatcgggactttga

SEQ ID NO: 8238 - DNA, 17 bp, Homo sapiens
gccatcgggactttgat

SEQ ID NO: 8239 - DNA, 17 bp, Homo sapiens
ccatcgggactttgatg

SEQ ID NO: 8240 - DNA, 17 bp, Homo sapiens
catcgggactttgatgt

SEQ ID NO: 8241 - DNA, 17 bp, Homo sapiens
atcgggactttgatgtg

SEQ ID NO: 8242 - DNA, 17 bp, Homo sapiens
tcgggactttgatgtgg

SEQ ID NO: 8243 - DNA, 17 bp, Homo sapiens
cgggactttgatgtgga

SEQ ID NO: 8244 - DNA, 17 bp, Homo sapiens
gggactttgatgtggag

SEQ ID NO: 8245 - DNA, 17 bp, Homo sapiens
ggactttgatgtggaga

SEQ ID NO: 8246 - DNA, 17 bp, Homo sapiens
gactttgatgtggagaa

SEQ ID NO: 8247 - DNA, 17 bp, Homo sapiens
actttgatgtggagaag

SEQ ID NO: 8248 - DNA, 17 bp, Homo sapiens
ctttgatgtggagaagc

SEQ ID NO: 8249 - DNA, 17 bp, Homo sapiens
tttgatgtggagaagcg

SEQ ID NO: 8250 - DNA, 17 bp, Homo sapiens
ttgatgtggagaagcga

SEQ ID NO: 8251 - DNA, 17 bp, Homo sapiens
tgatgtggagaagcgac

SEQ ID NO: 8252 - DNA, 17 bp, Homo sapiens
gatgtggagaagcgact

SEQ ID NO: 8253 - DNA, 17 bp, Homo sapiens
atgtggagaagcgactt

SEQ ID NO: 8254 - DNA, 17 bp, Homo sapiens
tgtggagaagcgacttc

SEQ ID NO: 8255 - DNA, 17 bp, Homo sapiens
gtggagaagcgacttcg

SEQ ID NO: 8256 - DNA, 17 bp, Homo sapiens
tggagaagcgacttcgg

SEQ ID NO: 8257 - DNA, 17 bp, Homo sapiens
ggagaagcgacttcgga

SEQ ID NO: 8258 - DNA, 17 bp, Homo sapiens
gagaagcgacttcggag

SEQ ID NO: 8259 - DNA, 17 bp, Homo sapiens
agaagcgacttcggaga

SEQ ID NO: 8260 - DNA, 17 bp, Homo sapiens
gaagcgacttcggagag

SEQ ID NO: 8261 - DNA, 17 bp, Homo sapiens
aagcgacttcggagaga

SEQ ID NO: 8262 - DNA, 17 bp, Homo sapiens
agcgacttcggagagac

SEQ ID NO: 8263 - DNA, 17 bp, Homo sapiens
gcgacttcggagagacc

SEQ ID NO: 8264 - DNA, 17 bp, Homo sapiens
cgacttcggagagacct

SEQ ID NO: 8265 - DNA, 17 bp, Homo sapiens
gacttcggagagacctc

SEQ ID NO: 8266 - DNA, 17 bp, Homo sapiens
acttcggagagacctca

SEQ ID NO: 8267 - DNA, 17 bp, Homo sapiens
cttcggagagacctcag

SEQ ID NO: 8268 - DNA, 17 bp, Homo sapiens
ttcggagagacctcagg

SEQ ID NO: 8269 - DNA, 17 bp, Homo sapiens
tcggagagacctcagga

SEQ ID NO: 8270 - DNA, 17 bp, Homo sapiens
cggagagacctcaggag

SEQ ID NO: 8271 - DNA, 17 bp, Homo sapiens
ggagagacctcaggagg

SEQ ID NO: 8272 - DNA, 17 bp, Homo sapiens
gagagacctcaggagga

SEQ ID NO: 8273 - DNA, 17 bp, Homo sapiens
agagacctcaggaggac

SEQ ID NO: 8274 - DNA, 17 bp, Homo sapiens
gagacctcaggaggaca

SEQ ID NO: 8275 - DNA, 17 bp, Homo sapiens
agacctcaggaggacac

SEQ ID NO: 8276 - DNA, 17 bp, Homo sapiens
gacctcaggaggacaca

SEQ ID NO: 8277 - DNA, 17 bp, Homo sapiens
acctcaggaggacacat

SEQ ID NO: 8278 - DNA, 17 bp, Homo sapiens
cctcaggaggacacatg

SEQ ID NO: 8279 - DNA, 17 bp, Homo sapiens
ctcaggaggacacatgc

SEQ ID NO: 8280 - DNA, 17 bp, Homo sapiens
tcaggaggacacatgca

SEQ ID NO: 8281 - DNA, 17 bp, Homo sapiens
caggaggacacatgcac

SEQ ID NO: 8282 - DNA, 17 bp, Homo sapiens
aggaggacacatgcact

SEQ ID NO: 8283 - DNA, 17 bp, Homo sapiens
ggaggacacatgcactg

SEQ ID NO: 8284 - DNA, 17 bp, Homo sapiens
gaggacacatgcactgt

SEQ ID NO: 8285 - DNA, 17 bp, Homo sapiens
aggacacatgcactgtt

SEQ ID NO: 8286 - DNA, 17 bp, Homo sapiens
ggacacatgcactgttg

SEQ ID NO: 8287 - DNA, 17 bp, Homo sapiens
gacacatgcactgttgt

SEQ ID NO: 8288 - DNA, 17 bp, Homo sapiens
acacatgcactgttgtc

SEQ ID NO: 8289 - DNA, 17 bp, Homo sapiens
cacatgcactgttgtca

SEQ ID NO: 8290 - DNA, 17 bp, Homo sapiens
acatgcactgttgtcag

SEQ ID NO: 8291 - DNA, 17 bp, Homo sapiens
catgcactgttgtcaga

SEQ ID NO: 8292 - DNA, 17 bp, Homo sapiens
atgcactgttgtcagac

SEQ ID NO: 8293 - DNA, 17 bp, Homo sapiens
tgcactgttgtcagacg

SEQ ID NO: 8294 - DNA, 17 bp, Homo sapiens
gcactgttgtcagacgt

SEQ ID NO: 8295 - DNA, 17 bp, Homo sapiens
cactgttgtcagacgtg

SEQ ID NO: 8296 - DNA, 17 bp, Homo sapiens
actgttgtcagacgtgc

SEQ ID NO: 8297 - DNA, 17 bp, Homo sapiens
ctgttgtcagacgtgca

SEQ ID NO: 8298 - DNA, 17 bp, Homo sapiens
tgttgtcagacgtgcag

SEQ ID NO: 8299 - DNA, 17 bp, Homo sapiens
gttgtcagacgtgcagc

SEQ ID NO: 8300 - DNA, 17 bp, Homo sapiens
ttgtcagacgtgcagct

SEQ ID NO: 8301 - DNA, 17 bp, Homo sapiens
tgtcagacgtgcagctc

SEQ ID NO: 8302 - DNA, 17 bp, Homo sapiens
gtcagacgtgcagctcc

SEQ ID NO: 8303 - DNA, 17 bp, Homo sapiens
tcagacgtgcagctcct

SEQ ID NO: 8304 - DNA, 17 bp, Homo sapiens
cagacgtgcagctcctt

SEQ ID NO: 8305 - DNA, 17 bp, Homo sapiens
agacgtgcagctccttc

SEQ ID NO: 8306 - DNA, 17 bp, Homo sapiens
gacgtgcagctccttct

SEQ ID NO: 8307 - DNA, 17 bp, Homo sapiens
acgtgcagctccttctg

SEQ ID NO: 8308 - DNA, 17 bp, Homo sapiens
cgtgcagctccttctgg

SEQ ID NO: 8309 - DNA, 17 bp, Homo sapiens
gtgcagctccttctggg

SEQ ID NO: 8310 - DNA, 17 bp, Homo sapiens
tgcagctccttctgggc

SEQ ID NO: 8311 - DNA, 17 bp, Homo sapiens
gcagctccttctgggca

SEQ ID NO: 8312 - DNA, 17 bp, Homo sapiens
cagctccttctgggcac

SEQ ID NO: 8313 - DNA, 17 bp, Homo sapiens
agctccttctgggcacc

SEQ ID NO: 8314 - DNA, 17 bp, Homo sapiens
gctccttctgggcacca

SEQ ID NO: 8315 - DNA, 17 bp, Homo sapiens
ctccttctgggcaccat

SEQ ID NO: 8316 - DNA, 17 bp, Homo sapiens
tccttctgggcaccatg

SEQ ID NO: 8317 - DNA, 17 bp, Homo sapiens
ccttctgggcaccatgg

SEQ ID NO: 8318 - DNA, 17 bp, Homo sapiens
cttctgggcaccatgga

SEQ ID NO: 8319 - DNA, 17 bp, Homo sapiens
ttctgggcaccatggag

SEQ ID NO: 8320 - DNA, 17 bp, Homo sapiens
tctgggcaccatggagg

SEQ ID NO: 8321 - DNA, 17 bp, Homo sapiens
ctgggcaccatggagga

SEQ ID NO: 8322 - DNA, 17 bp, Homo sapiens
tgggcaccatggaggat

SEQ ID NO: 8323 - DNA, 17 bp, Homo sapiens
gggcaccatggaggatg

SEQ ID NO: 8324 - DNA, 17 bp, Homo sapiens
ggcaccatggaggatgg

SEQ ID NO: 8325 - DNA, 17 bp, Homo sapiens
gcaccatggaggatggc

SEQ ID NO: 8326 - DNA, 17 bp, Homo sapiens
caccatggaggatggca

SEQ ID NO: 8327 - DNA, 17 bp, Homo sapiens
accatggaggatggcaa

SEQ ID NO: 8328 - DNA, 17 bp, Homo sapiens
ccatggaggatggcaag

SEQ ID NO: 8329 - DNA, 17 bp, Homo sapiens
catggaggatggcaaga

SEQ ID NO: 8330 - DNA, 17 bp, Homo sapiens
atggaggatggcaagac

SEQ ID NO: 8331 - DNA, 17 bp, Homo sapiens
tggaggatggcaagaca

SEQ ID NO: 8332 - DNA, 17 bp, Homo sapiens
ggaggatggcaagacat

SEQ ID NO: 8333 - DNA, 17 bp, Homo sapiens
gaggatggcaagacatc

SEQ ID NO: 8334 - DNA, 17 bp, Homo sapiens
aggatggcaagacatca

SEQ ID NO: 8335 - DNA, 17 bp, Homo sapiens
ggatggcaagacatcag

SEQ ID NO: 8336 - DNA, 17 bp, Homo sapiens
gatggcaagacatcagt

SEQ ID NO: 8337 - DNA, 17 bp, Homo sapiens
atggcaagacatcagtc

SEQ ID NO: 8338 - DNA, 17 bp, Homo sapiens
tggcaagacatcagtca

SEQ ID NO: 8339 - DNA, 17 bp, Homo sapiens
ggcaagacatcagtcag

SEQ ID NO: 8340 - DNA, 17 bp, Homo sapiens
gcaagacatcagtcagc

SEQ ID NO: 8341 - DNA, 17 bp, Homo sapiens
caagacatcagtcagca

SEQ ID NO: 8342 - DNA, 17 bp, Homo sapiens
aagacatcagtcagcaa

SEQ ID NO: 8343 - DNA, 17 bp, Homo sapiens
agacatcagtcagcaag

SEQ ID NO: 8344 - DNA, 17 bp, Homo sapiens
gacatcagtcagcaagg

SEQ ID NO: 8345 - DNA, 17 bp, Homo sapiens
acatcagtcagcaagga

SEQ ID NO: 8346 - DNA, 17 bp, Homo sapiens
catcagtcagcaaggag

SEQ ID NO: 8347 - DNA, 17 bp, Homo sapiens
atcagtcagcaaggagg

SEQ ID NO: 8348 - DNA, 17 bp, Homo sapiens
tcagtcagcaaggagga

SEQ ID NO: 8349 - DNA, 17 bp, Homo sapiens
cagtcagcaaggaggag

SEQ ID NO: 8350 - DNA, 17 bp, Homo sapiens
agtcagcaaggaggagc

SEQ ID NO: 8351 - DNA, 17 bp, Homo sapiens
gtcagcaaggaggagct

SEQ ID NO: 8352 - DNA, 17 bp, Homo sapiens
tcagcaaggaggagctg

SEQ ID NO: 8353 - DNA, 17 bp, Homo sapiens
cagcaaggaggagctgg

SEQ ID NO: 8354 - DNA, 17 bp, Homo sapiens
agcaaggaggagctgga

SEQ ID NO: 8355 - DNA, 17 bp, Homo sapiens
gcaaggaggagctggag

SEQ ID NO: 8356 - DNA, 17 bp, Homo sapiens
caaggaggagctggaga

SEQ ID NO: 8357 - DNA, 17 bp, Homo sapiens
aaggaggagctggagaa

SEQ ID NO: 8358 - DNA, 17 bp, Homo sapiens
aggaggagctggagaaa

SEQ ID NO: 8359 - DNA, 17 bp, Homo sapiens
ggaggagctggagaaag

SEQ ID NO: 8360 - DNA, 17 bp, Homo sapiens
gaggagctggagaaagt

SEQ ID NO: 8361 - DNA, 17 bp, Homo sapiens
aggagctggagaaagtg

SEQ ID NO: 8362 - DNA, 17 bp, Homo sapiens
ggagctggagaaagtgc

SEQ ID NO: 8363 - DNA, 17 bp, Homo sapiens
gagctggagaaagtgca

SEQ ID NO: 8364 - DNA, 17 bp, Homo sapiens
agctggagaaagtgcac

SEQ ID NO: 8365 - DNA, 17 bp, Homo sapiens
gctggagaaagtgcaca

SEQ ID NO: 8366 - DNA, 17 bp, Homo sapiens
ctggagaaagtgcacag

SEQ ID NO: 8367 - DNA, 17 bp, Homo sapiens
tggagaaagtgcacagc

SEQ ID NO: 8368 - DNA, 17 bp, Homo sapiens
ggagaaagtgcacagcc

SEQ ID NO: 8369 - DNA, 17 bp, Homo sapiens
gagaaagtgcacagcca

SEQ ID NO: 8370 - DNA, 17 bp, Homo sapiens
agaaagtgcacagccag

SEQ ID NO: 8371 - DNA, 17 bp, Homo sapiens
gaaagtgcacagccagc

SEQ ID NO: 8372 - DNA, 17 bp, Homo sapiens
aaagtgcacagccagct

SEQ ID NO: 8373 - DNA, 17 bp, Homo sapiens
aagtgcacagccagctg

SEQ ID NO: 8374 - DNA, 17 bp, Homo sapiens
agtgcacagccagctgg

SEQ ID NO: 8375 - DNA, 17 bp, Homo sapiens
gtgcacagccagctgga

SEQ ID NO: 8376 - DNA, 17 bp, Homo sapiens
tgcacagccagctggag

SEQ ID NO: 8377 - DNA, 17 bp, Homo sapiens
gcacagccagctggagc

SEQ ID NO: 8378 - DNA, 17 bp, Homo sapiens
cacagccagctggagca

SEQ ID NO: 8379 - DNA, 17 bp, Homo sapiens
acagccagctggagcag

SEQ ID NO: 8380 - DNA, 17 bp, Homo sapiens
cagccagctggagcaga

SEQ ID NO: 8381 - DNA, 17 bp, Homo sapiens
agccagctggagcagag

SEQ ID NO: 8382 - DNA, 17 bp, Homo sapiens
gccagctggagcagagt

SEQ ID NO: 8383 - DNA, 17 bp, Homo sapiens
ccagctggagcagagtg

SEQ ID NO: 8384 - DNA, 17 bp, Homo sapiens
cagctggagcagagtga

SEQ ID NO: 8385 - DNA, 17 bp, Homo sapiens
agctggagcagagtgaa

SEQ ID NO: 8386 - DNA, 17 bp, Homo sapiens
gctggagcagagtgaag

SEQ ID NO: 8387 - DNA, 17 bp, Homo sapiens
ctggagcagagtgaagc

SEQ ID NO: 8388 - DNA, 17 bp, Homo sapiens
tggagcagagtgaagcc

SEQ ID NO: 8389 - DNA, 17 bp, Homo sapiens
ggagcagagtgaagcca

SEQ ID NO: 8390 - DNA, 17 bp, Homo sapiens
gagcagagtgaagccaa

SEQ ID NO: 8391 - DNA, 17 bp, Homo sapiens
agcagagtgaagccaag

SEQ ID NO: 8392 - DNA, 17 bp, Homo sapiens
gcagagtgaagccaagt

SEQ ID NO: 8393 - DNA, 17 bp, Homo sapiens
cagagtgaagccaagtg

SEQ ID NO: 8394 - DNA, 17 bp, Homo sapiens
agagtgaagccaagtgt

SEQ ID NO: 8395 - DNA, 17 bp, Homo sapiens
gagtgaagccaagtgtg

SEQ ID NO: 8396 - DNA, 17 bp, Homo sapiens
agtgaagccaagtgtga

SEQ ID NO: 8397 - DNA, 17 bp, Homo sapiens
gtgaagccaagtgtgag

SEQ ID NO: 8398 - DNA, 17 bp, Homo sapiens
tgaagccaagtgtgagg

SEQ ID NO: 8399 - DNA, 17 bp, Homo sapiens
gaagccaagtgtgagga

SEQ ID NO: 8400 - DNA, 17 bp, Homo sapiens
aagccaagtgtgaggag

SEQ ID NO: 8401 - DNA, 17 bp, Homo sapiens
agccaagtgtgaggagg

SEQ ID NO: 8402 - DNA, 17 bp, Homo sapiens
gccaagtgtgaggaggc

SEQ ID NO: 8403 - DNA, 17 bp, Homo sapiens
ccaagtgtgaggaggcc

SEQ ID NO: 8404 - DNA, 17 bp, Homo sapiens
caagtgtgaggaggcct

SEQ ID NO: 8405 - DNA, 17 bp, Homo sapiens
aagtgtgaggaggcctt

SEQ ID NO: 8406 - DNA, 17 bp, Homo sapiens
agtgtgaggaggccttg

SEQ ID NO: 8407 - DNA, 17 bp, Homo sapiens
gtgtgaggaggccttga

SEQ ID NO: 8408 - DNA, 17 bp, Homo sapiens
tgtgaggaggccttgaa

SEQ ID NO: 8409 - DNA, 17 bp, Homo sapiens
gtgaggaggccttgaag

SEQ ID NO: 8410 - DNA, 17 bp, Homo sapiens
tgaggaggccttgaaga

SEQ ID NO: 8411 - DNA, 17 bp, Homo sapiens
gaggaggccttgaagac

SEQ ID NO: 8412 - DNA, 17 bp, Homo sapiens
aggaggccttgaagacg

SEQ ID NO: 8413 - DNA, 17 bp, Homo sapiens
ggaggccttgaagacgc

SEQ ID NO: 8414 - DNA, 17 bp, Homo sapiens
gaggccttgaagacgca

SEQ ID NO: 8415 - DNA, 17 bp, Homo sapiens
aggccttgaagacgcag

SEQ ID NO: 8416 - DNA, 17 bp, Homo sapiens
ggccttgaagacgcaga

SEQ ID NO: 8417 - DNA, 17 bp, Homo sapiens
gccttgaagacgcagaa

SEQ ID NO: 8418 - DNA, 17 bp, Homo sapiens
ccttgaagacgcagaag

SEQ ID NO: 8419 - DNA, 17 bp, Homo sapiens
cttgaagacgcagaagg

SEQ ID NO: 8420 - DNA, 17 bp, Homo sapiens
ttgaagacgcagaaggt

SEQ ID NO: 8421 - DNA, 17 bp, Homo sapiens
tgaagacgcagaaggtg

SEQ ID NO: 8422 - DNA, 17 bp, Homo sapiens
gaagacgcagaaggtgc

SEQ ID NO: 8423 - DNA, 17 bp, Homo sapiens
aagacgcagaaggtgct

SEQ ID NO: 8424 - DNA, 17 bp, Homo sapiens
agacgcagaaggtgctc

SEQ ID NO: 8425 - DNA, 17 bp, Homo sapiens
gacgcagaaggtgctca

SEQ ID NO: 8426 - DNA, 17 bp, Homo sapiens
acgcagaaggtgctcac

SEQ ID NO: 8427 - DNA, 17 bp, Homo sapiens
cgcagaaggtgctcaca

SEQ ID NO: 8428 - DNA, 17 bp, Homo sapiens
gcagaaggtgctcacag

SEQ ID NO: 8429 - DNA, 17 bp, Homo sapiens
cagaaggtgctcacagc

SEQ ID NO: 8430 - DNA, 17 bp, Homo sapiens
agaaggtgctcacagcg

SEQ ID NO: 8431 - DNA, 17 bp, Homo sapiens
gaaggtgctcacagcgg

SEQ ID NO: 8432 - DNA, 17 bp, Homo sapiens
aaggtgctcacagcgga

SEQ ID NO: 8433 - DNA, 17 bp, Homo sapiens
aggtgctcacagcggac

SEQ ID NO: 8434 - DNA, 17 bp, Homo sapiens
ggtgctcacagcggacc

SEQ ID NO: 8435 - DNA, 17 bp, Homo sapiens
gtgctcacagcggacct

SEQ ID NO: 8436 - DNA, 17 bp, Homo sapiens
tgctcacagcggacctg

SEQ ID NO: 8437 - DNA, 17 bp, Homo sapiens
gctcacagcggacctgg

SEQ ID NO: 8438 - DNA, 17 bp, Homo sapiens
ctcacagcggacctgga

SEQ ID NO: 8439 - DNA, 17 bp, Homo sapiens
tcacagcggacctggag

SEQ ID NO: 8440 - DNA, 17 bp, Homo sapiens
cacagcggacctggaga

SEQ ID NO: 8441 - DNA, 17 bp, Homo sapiens
acagcggacctggagag

SEQ ID NO: 8442 - DNA, 17 bp, Homo sapiens
cagcggacctggagagc

SEQ ID NO: 8443 - DNA, 17 bp, Homo sapiens
agcggacctggagagca

SEQ ID NO: 8444 - DNA, 17 bp, Homo sapiens
gcggacctggagagcat

SEQ ID NO: 8445 - DNA, 17 bp, Homo sapiens
cggacctggagagcatg

SEQ ID NO: 8446 - DNA, 17 bp, Homo sapiens
ggacctggagagcatgc

SEQ ID NO: 8447 - DNA, 17 bp, Homo sapiens
gacctggagagcatgca

SEQ ID NO: 8448 - DNA, 17 bp, Homo sapiens
acctggagagcatgcac

SEQ ID NO: 8449 - DNA, 17 bp, Homo sapiens
cctggagagcatgcaca

SEQ ID NO: 8450 - DNA, 17 bp, Homo sapiens
ctggagagcatgcacag

SEQ ID NO: 8451 - DNA, 17 bp, Homo sapiens
tggagagcatgcacagc

SEQ ID NO: 8452 - DNA, 17 bp, Homo sapiens
ggagagcatgcacagcg

SEQ ID NO: 8453 - DNA, 17 bp, Homo sapiens
gagagcatgcacagcga

SEQ ID NO: 8454 - DNA, 17 bp, Homo sapiens
agagcatgcacagcgag

SEQ ID NO: 8455 - DNA, 17 bp, Homo sapiens
gagcatgcacagcgagc

SEQ ID NO: 8456 - DNA, 17 bp, Homo sapiens
agcatgcacagcgagct

SEQ ID NO: 8457 - DNA, 17 bp, Homo sapiens
gcatgcacagcgagctg

SEQ ID NO: 8458 - DNA, 17 bp, Homo sapiens
catgcacagcgagctgg

SEQ ID NO: 8459 - DNA, 17 bp, Homo sapiens
atgcacagcgagctgga

SEQ ID NO: 8460 - DNA, 17 bp, Homo sapiens
tgcacagcgagctggag

SEQ ID NO: 8461 - DNA, 17 bp, Homo sapiens
gcacagcgagctggaga

SEQ ID NO: 8462 - DNA, 17 bp, Homo sapiens
cacagcgagctggagaa

SEQ ID NO: 8463 - DNA, 17 bp, Homo sapiens
acagcgagctggagaac

SEQ ID NO: 8464 - DNA, 17 bp, Homo sapiens
cagcgagctggagaaca

SEQ ID NO: 8465 - DNA, 17 bp, Homo sapiens
agcgagctggagaacat

SEQ ID NO: 8466 - DNA, 17 bp, Homo sapiens
gcgagctggagaacatg

SEQ ID NO: 8467 - DNA, 17 bp, Homo sapiens
cgagctggagaacatga

SEQ ID NO: 8468 - DNA, 17 bp, Homo sapiens
gagctggagaacatgac

SEQ ID NO: 8469 - DNA, 17 bp, Homo sapiens
agctggagaacatgacg

SEQ ID NO: 8470 - DNA, 17 bp, Homo sapiens
gctggagaacatgacgc

SEQ ID NO: 8471 - DNA, 17 bp, Homo sapiens
ctggagaacatgacgcg

SEQ ID NO: 8472 - DNA, 17 bp, Homo sapiens
tggagaacatgacgcgg

SEQ ID NO: 8473 - DNA, 17 bp, Homo sapiens
ggagaacatgacgcgga

SEQ ID NO: 8474 - DNA, 17 bp, Homo sapiens
gagaacatgacgcggaa

SEQ ID NO: 8475 - DNA, 17 bp, Homo sapiens
agaacatgacgcggaac

SEQ ID NO: 8476 - DNA, 17 bp, Homo sapiens
gaacatgacgcggaaca

SEQ ID NO: 8477 - DNA, 17 bp, Homo sapiens
aacatgacgcggaacaa

SEQ ID NO: 8478 - DNA, 17 bp, Homo sapiens
acatgacgcggaacaag

SEQ ID NO: 8479 - DNA, 17 bp, Homo sapiens
catgacgcggaacaaga

SEQ ID NO: 8480 - DNA, 17 bp, Homo sapiens
atgacgcggaacaagag

SEQ ID NO: 8481 - DNA, 17 bp, Homo sapiens
tgacgcggaacaagagc

SEQ ID NO: 8482 - DNA, 17 bp, Homo sapiens
gacgcggaacaagagcc

SEQ ID NO: 8483 - DNA, 17 bp, Homo sapiens
acgcggaacaagagcct

SEQ ID NO: 8484 - DNA, 17 bp, Homo sapiens
cgcggaacaagagcctg

SEQ ID NO: 8485 - DNA, 17 bp, Homo sapiens
gcggaacaagagcctgg

SEQ ID NO: 8486 - DNA, 17 bp, Homo sapiens
cggaacaagagcctggt

SEQ ID NO: 8487 - DNA, 17 bp, Homo sapiens
ggaacaagagcctggtg

SEQ ID NO: 8488 - DNA, 17 bp, Homo sapiens
gaacaagagcctggtgg

SEQ ID NO: 8489 - DNA, 17 bp, Homo sapiens
aacaagagcctggtgga

SEQ ID NO: 8490 - DNA, 17 bp, Homo sapiens
acaagagcctggtggat

SEQ ID NO: 8491 - DNA, 17 bp, Homo sapiens
caagagcctggtggatg

SEQ ID NO: 8492 - DNA, 17 bp, Homo sapiens
aagagcctggtggatga

SEQ ID NO: 8493 - DNA, 17 bp, Homo sapiens
agagcctggtggatgag

SEQ ID NO: 8494 - DNA, 17 bp, Homo sapiens
gagcctggtggatgagc

SEQ ID NO: 8495 - DNA, 17 bp, Homo sapiens
agcctggtggatgagca

SEQ ID NO: 8496 - DNA, 17 bp, Homo sapiens
gcctggtggatgagcag

SEQ ID NO: 8497 - DNA, 17 bp, Homo sapiens
cctggtggatgagcagc

SEQ ID NO: 8498 - DNA, 17 bp, Homo sapiens
ctggtggatgagcagct

SEQ ID NO: 8499 - DNA, 17 bp, Homo sapiens
tggtggatgagcagctg

SEQ ID NO: 8500 - DNA, 17 bp, Homo sapiens
ggtggatgagcagctgt

SEQ ID NO: 8501 - DNA, 17 bp, Homo sapiens
gtggatgagcagctgta

SEQ ID NO: 8502 - DNA, 17 bp, Homo sapiens
tggatgagcagctgtac

SEQ ID NO: 8503 - DNA, 17 bp, Homo sapiens
ggatgagcagctgtaca

SEQ ID NO: 8504 - DNA, 17 bp, Homo sapiens
gatgagcagctgtacag

SEQ ID NO: 8505 - DNA, 17 bp, Homo sapiens
atgagcagctgtacagg

SEQ ID NO: 8506 - DNA, 17 bp, Homo sapiens
tgagcagctgtacaggc

SEQ ID NO: 8507 - DNA, 17 bp, Homo sapiens
gagcagctgtacaggct

SEQ ID NO: 8508 - DNA, 17 bp, Homo sapiens
agcagctgtacaggctg

SEQ ID NO: 8509 - DNA, 17 bp, Homo sapiens
gcagctgtacaggctgc

SEQ ID NO: 8510 - DNA, 17 bp, Homo sapiens
cagctgtacaggctgca

SEQ ID NO: 8511 - DNA, 17 bp, Homo sapiens
agctgtacaggctgcag

SEQ ID NO: 8512 - DNA, 17 bp, Homo sapiens
gctgtacaggctgcagt

SEQ ID NO: 8513 - DNA, 17 bp, Homo sapiens
ctgtacaggctgcagtt

SEQ ID NO: 8514 - DNA, 17 bp, Homo sapiens
tgtacaggctgcagttt

SEQ ID NO: 8515 - DNA, 17 bp, Homo sapiens
gtacaggctgcagtttg

SEQ ID NO: 8516 - DNA, 17 bp, Homo sapiens
tacaggctgcagtttga

SEQ ID NO: 8517 - DNA, 17 bp, Homo sapiens
acaggctgcagtttgag

SEQ ID NO: 8518 - DNA, 17 bp, Homo sapiens
caggctgcagtttgaga

SEQ ID NO: 8519 - DNA, 17 bp, Homo sapiens
aggctgcagtttgagaa

SEQ ID NO: 8520 - DNA, 17 bp, Homo sapiens
ggctgcagtttgagaag

SEQ ID NO: 8521 - DNA, 17 bp, Homo sapiens
gctgcagtttgagaagg

SEQ ID NO: 8522 - DNA, 17 bp, Homo sapiens
ctgcagtttgagaaggc

SEQ ID NO: 8523 - DNA, 17 bp, Homo sapiens
tgcagtttgagaaggcg

SEQ ID NO: 8524 - DNA, 17 bp, Homo sapiens
gcagtttgagaaggcgg

SEQ ID NO: 8525 - DNA, 17 bp, Homo sapiens
cagtttgagaaggcgga

SEQ ID NO: 8526 - DNA, 17 bp, Homo sapiens
agtttgagaaggcggac

SEQ ID NO: 8527 - DNA, 17 bp, Homo sapiens
gtttgagaaggcggacc

SEQ ID NO: 8528 - DNA, 17 bp, Homo sapiens
tttgagaaggcggacct

SEQ ID NO: 8529 - DNA, 17 bp, Homo sapiens
ttgagaaggcggacctc

SEQ ID NO: 8530 - DNA, 17 bp, Homo sapiens
tgagaaggcggacctcc

SEQ ID NO: 8531 - DNA, 17 bp, Homo sapiens
gagaaggcggacctcct

SEQ ID NO: 8532 - DNA, 17 bp, Homo sapiens
agaaggcggacctcctg

SEQ ID NO: 8533 - DNA, 17 bp, Homo sapiens
gaaggcggacctcctga

SEQ ID NO: 8534 - DNA, 17 bp, Homo sapiens
aaggcggacctcctgaa

SEQ ID NO: 8535 - DNA, 17 bp, Homo sapiens
aggcggacctcctgaag

SEQ ID NO: 8536 - DNA, 17 bp, Homo sapiens
ggcggacctcctgaagc

SEQ ID NO: 8537 - DNA, 17 bp, Homo sapiens
gcggacctcctgaagcg

SEQ ID NO: 8538 - DNA, 17 bp, Homo sapiens
cggacctcctgaagcgc

SEQ ID NO: 8539 - DNA, 17 bp, Homo sapiens
ggacctcctgaagcgca

SEQ ID NO: 8540 - DNA, 17 bp, Homo sapiens
gacctcctgaagcgcat

SEQ ID NO: 8541 - DNA, 17 bp, Homo sapiens
acctcctgaagcgcatc

SEQ ID NO: 8542 - DNA, 17 bp, Homo sapiens
cctcctgaagcgcatcg

SEQ ID NO: 8543 - DNA, 17 bp, Homo sapiens
ctcctgaagcgcatcga

SEQ ID NO: 8544 - DNA, 17 bp, Homo sapiens
tcctgaagcgcatcgat

SEQ ID NO: 8545 - DNA, 17 bp, Homo sapiens
cctgaagcgcatcgatg

SEQ ID NO: 8546 - DNA, 17 bp, Homo sapiens
ctgaagcgcatcgatga

SEQ ID NO: 8547 - DNA, 17 bp, Homo sapiens
tgaagcgcatcgatgag

SEQ ID NO: 8548 - DNA, 17 bp, Homo sapiens
gaagcgcatcgatgagg

SEQ ID NO: 8549 - DNA, 17 bp, Homo sapiens
aagcgcatcgatgagga

SEQ ID NO: 8550 - DNA, 17 bp, Homo sapiens
agcgcatcgatgaggac

SEQ ID NO: 8551 - DNA, 17 bp, Homo sapiens
gcgcatcgatgaggacc

SEQ ID NO: 8552 - DNA, 17 bp, Homo sapiens
cgcatcgatgaggacca

SEQ ID NO: 8553 - DNA, 17 bp, Homo sapiens
gcatcgatgaggaccag

SEQ ID NO: 8554 - DNA, 17 bp, Homo sapiens
catcgatgaggaccagg

SEQ ID NO: 8555 - DNA, 17 bp, Homo sapiens
atcgatgaggaccagga

SEQ ID NO: 8556 - DNA, 17 bp, Homo sapiens
tcgatgaggaccaggat

SEQ ID NO: 8557 - DNA, 17 bp, Homo sapiens
cgatgaggaccaggatg

SEQ ID NO: 8558 - DNA, 17 bp, Homo sapiens
gatgaggaccaggatga

SEQ ID NO: 8559 - DNA, 17 bp, Homo sapiens
atgaggaccaggatgac

SEQ ID NO: 8560 - DNA, 17 bp, Homo sapiens
tgaggaccaggatgacc

SEQ ID NO: 8561 - DNA, 17 bp, Homo sapiens
gaggaccaggatgacct

SEQ ID NO: 8562 - DNA, 17 bp, Homo sapiens
aggaccaggatgacctg

SEQ ID NO: 8563 - DNA, 17 bp, Homo sapiens
ggaccaggatgacctga

SEQ ID NO: 8564 - DNA, 17 bp, Homo sapiens
gaccaggatgacctgaa

SEQ ID NO: 8565 - DNA, 17 bp, Homo sapiens
accaggatgacctgaat

SEQ ID NO: 8566 - DNA, 17 bp, Homo sapiens
ccaggatgacctgaatg

SEQ ID NO: 8567 - DNA, 17 bp, Homo sapiens
caggatgacctgaatga

SEQ ID NO: 8568 - DNA, 17 bp, Homo sapiens
aggatgacctgaatgag

SEQ ID NO: 8569 - DNA, 17 bp, Homo sapiens
ggatgacctgaatgagc

SEQ ID NO: 8570 - DNA, 17 bp, Homo sapiens
gatgacctgaatgagct

SEQ ID NO: 8571 - DNA, 17 bp, Homo sapiens
atgacctgaatgagctg

SEQ ID NO: 8572 - DNA, 17 bp, Homo sapiens
tgacctgaatgagctga

SEQ ID NO: 8573 - DNA, 17 bp, Homo sapiens
gacctgaatgagctgat

SEQ ID NO: 8574 - DNA, 17 bp, Homo sapiens
acctgaatgagctgatg

SEQ ID NO: 8575 - DNA, 17 bp, Homo sapiens
cctgaatgagctgatgc

SEQ ID NO: 8576 - DNA, 17 bp, Homo sapiens
ctgaatgagctgatgca

SEQ ID NO: 8577 - DNA, 17 bp, Homo sapiens
tgaatgagctgatgcag

SEQ ID NO: 8578 - DNA, 17 bp, Homo sapiens
gaatgagctgatgcaga

SEQ ID NO: 8579 - DNA, 17 bp, Homo sapiens
aatgagctgatgcagaa

SEQ ID NO: 8580 - DNA, 17 bp, Homo sapiens
atgagctgatgcagaag

SEQ ID NO: 8581 - DNA, 17 bp, Homo sapiens
tgagctgatgcagaagc

SEQ ID NO: 8582 - DNA, 17 bp, Homo sapiens
gagctgatgcagaagca

SEQ ID NO: 8583 - DNA, 17 bp, Homo sapiens
agctgatgcagaagcac

SEQ ID NO: 8584 - DNA, 17 bp, Homo sapiens
gctgatgcagaagcaca

SEQ ID NO: 8585 - DNA, 17 bp, Homo sapiens
ctgatgcagaagcacaa

SEQ ID NO: 8586 - DNA, 17 bp, Homo sapiens
tgatgcagaagcacaag

SEQ ID NO: 8587 - DNA, 17 bp, Homo sapiens
gatgcagaagcacaagg

SEQ ID NO: 8588 - DNA, 17 bp, Homo sapiens
atgcagaagcacaagga

SEQ ID NO: 8589 - DNA, 17 bp, Homo sapiens
tgcagaagcacaaggac

SEQ ID NO: 8590 - DNA, 17 bp, Homo sapiens
gcagaagcacaaggacc

SEQ ID NO: 8591 - DNA, 17 bp, Homo sapiens
cagaagcacaaggacct

SEQ ID NO: 8592 - DNA, 17 bp, Homo sapiens
agaagcacaaggacctc

SEQ ID NO: 8593 - DNA, 17 bp, Homo sapiens
gaagcacaaggacctca

SEQ ID NO: 8594 - DNA, 17 bp, Homo sapiens
aagcacaaggacctcat

SEQ ID NO: 8595 - DNA, 17 bp, Homo sapiens
agcacaaggacctcatt

SEQ ID NO: 8596 - DNA, 17 bp, Homo sapiens
gcacaaggacctcattg

SEQ ID NO: 8597 - DNA, 17 bp, Homo sapiens
cacaaggacctcattgc

SEQ ID NO: 8598 - DNA, 17 bp, Homo sapiens
acaaggacctcattgct

SEQ ID NO: 8599 - DNA, 17 bp, Homo sapiens
caaggacctcattgctc

SEQ ID NO: 8600 - DNA, 17 bp, Homo sapiens
aaggacctcattgctca

SEQ ID NO: 8601 - DNA, 17 bp, Homo sapiens
aggacctcattgctcag

SEQ ID NO: 8602 - DNA, 17 bp, Homo sapiens
ggacctcattgctcagt

SEQ ID NO: 8603 - DNA, 17 bp, Homo sapiens
gacctcattgctcagtc

SEQ ID NO: 8604 - DNA, 17 bp, Homo sapiens
acctcattgctcagtct

SEQ ID NO: 8605 - DNA, 17 bp, Homo sapiens
cctcattgctcagtctg

SEQ ID NO: 8606 - DNA, 17 bp, Homo sapiens
ctcattgctcagtctgc

SEQ ID NO: 8607 - DNA, 17 bp, Homo sapiens
tcattgctcagtctgct

SEQ ID NO: 8608 - DNA, 17 bp, Homo sapiens
cattgctcagtctgctg

SEQ ID NO: 8609 - DNA, 17 bp, Homo sapiens
attgctcagtctgctgc

SEQ ID NO: 8610 - DNA, 17 bp, Homo sapiens
ttgctcagtctgctgct

SEQ ID NO: 8611 - DNA, 17 bp, Homo sapiens
tgctcagtctgctgctg

SEQ ID NO: 8612 - DNA, 17 bp, Homo sapiens
gctcagtctgctgctga

SEQ ID NO: 8613 - DNA, 17 bp, Homo sapiens
ctcagtctgctgctgac

SEQ ID NO: 8614 - DNA, 17 bp, Homo sapiens
tcagtctgctgctgaca

SEQ ID NO: 8615 - DNA, 17 bp, Homo sapiens
cagtctgctgctgacat

SEQ ID NO: 8616 - DNA, 17 bp, Homo sapiens
agtctgctgctgacatt

SEQ ID NO: 8617 - DNA, 17 bp, Homo sapiens
gtctgctgctgacattg

SEQ ID NO: 8618 - DNA, 17 bp, Homo sapiens
tctgctgctgacattgg

SEQ ID NO: 8619 - DNA, 17 bp, Homo sapiens
ctgctgctgacattggg

SEQ ID NO: 8620 - DNA, 17 bp, Homo sapiens
tgctgctgacattgggc

SEQ ID NO: 8621 - DNA, 17 bp, Homo sapiens
gctgctgacattgggca

SEQ ID NO: 8622 - DNA, 17 bp, Homo sapiens
ctgctgacattgggcag

SEQ ID NO: 8623 - DNA, 17 bp, Homo sapiens
tgctgacattgggcaga

SEQ ID NO: 8624 - DNA, 17 bp, Homo sapiens
gctgacattgggcagat

SEQ ID NO: 8625 - DNA, 17 bp, Homo sapiens
ctgacattgggcagatc

SEQ ID NO: 8626 - DNA, 17 bp, Homo sapiens
tgacattgggcagatcc

SEQ ID NO: 8627 - DNA, 17 bp, Homo sapiens
gacattgggcagatcca

SEQ ID NO: 8628 - DNA, 17 bp, Homo sapiens
acattgggcagatccaa

SEQ ID NO: 8629 - DNA, 17 bp, Homo sapiens
cattgggcagatccaag

SEQ ID NO: 8630 - DNA, 17 bp, Homo sapiens
attgggcagatccaaga

SEQ ID NO: 8631 - DNA, 17 bp, Homo sapiens
ttgggcagatccaagaa

SEQ ID NO: 8632 - DNA, 17 bp, Homo sapiens
tgggcagatccaagaac

SEQ ID NO: 8633 - DNA, 17 bp, Homo sapiens
gggcagatccaagaact

SEQ ID NO: 8634 - DNA, 17 bp, Homo sapiens
ggcagatccaagaactg

SEQ ID NO: 8635 - DNA, 17 bp, Homo sapiens
gcagatccaagaactgc

SEQ ID NO: 8636 - DNA, 17 bp, Homo sapiens
cagatccaagaactgca

SEQ ID NO: 8637 - DNA, 17 bp, Homo sapiens
agatccaagaactgcag

SEQ ID NO: 8638 - DNA, 17 bp, Homo sapiens
gatccaagaactgcagc

SEQ ID NO: 8639 - DNA, 17 bp, Homo sapiens
atccaagaactgcagct

SEQ ID NO: 8640 - DNA, 17 bp, Homo sapiens
tccaagaactgcagctg

SEQ ID NO: 8641 - DNA, 17 bp, Homo sapiens
ccaagaactgcagctgc

SEQ ID NO: 8642 - DNA, 17 bp, Homo sapiens
caagaactgcagctgca

SEQ ID NO: 8643 - DNA, 17 bp, Homo sapiens
aagaactgcagctgcag

SEQ ID NO: 8644 - DNA, 17 bp, Homo sapiens
agaactgcagctgcagc

SEQ ID NO: 8645 - DNA, 17 bp, Homo sapiens
gaactgcagctgcagct

SEQ ID NO: 8646 - DNA, 17 bp, Homo sapiens
aactgcagctgcagctg

SEQ ID NO: 8647 - DNA, 17 bp, Homo sapiens
actgcagctgcagctgg

SEQ ID NO: 8648 - DNA, 17 bp, Homo sapiens
ctgcagctgcagctgga

SEQ ID NO: 8649 - DNA, 17 bp, Homo sapiens
tgcagctgcagctggag

SEQ ID NO: 8650 - DNA, 17 bp, Homo sapiens
gcagctgcagctggagg

SEQ ID NO: 8651 - DNA, 17 bp, Homo sapiens
cagctgcagctggagga

SEQ ID NO: 8652 - DNA, 17 bp, Homo sapiens
agctgcagctggaggaa

SEQ ID NO: 8653 - DNA, 17 bp, Homo sapiens
gctgcagctggaggaag

SEQ ID NO: 8654 - DNA, 17 bp, Homo sapiens
ctgcagctggaggaagc

SEQ ID NO: 8655 - DNA, 17 bp, Homo sapiens
tgcagctggaggaagcc

SEQ ID NO: 8656 - DNA, 17 bp, Homo sapiens
gcagctggaggaagcca

SEQ ID NO: 8657 - DNA, 17 bp, Homo sapiens
cagctggaggaagccaa

SEQ ID NO: 8658 - DNA, 17 bp, Homo sapiens
agctggaggaagccaag

SEQ ID NO: 8659 - DNA, 17 bp, Homo sapiens
gctggaggaagccaaga

SEQ ID NO: 8660 - DNA, 17 bp, Homo sapiens
ctggaggaagccaagaa

SEQ ID NO: 8661 - DNA, 17 bp, Homo sapiens
tggaggaagccaagaag

SEQ ID NO: 8662 - DNA, 17 bp, Homo sapiens
ggaggaagccaagaagg

SEQ ID NO: 8663 - DNA, 17 bp, Homo sapiens
gaggaagccaagaagga

SEQ ID NO: 8664 - DNA, 17 bp, Homo sapiens
aggaagccaagaaggag

SEQ ID NO: 8665 - DNA, 17 bp, Homo sapiens
ggaagccaagaaggaga

SEQ ID NO: 8666 - DNA, 17 bp, Homo sapiens
gaagccaagaaggagaa

SEQ ID NO: 8667 - DNA, 17 bp, Homo sapiens
aagccaagaaggagaag

SEQ ID NO: 8668 - DNA, 17 bp, Homo sapiens
agccaagaaggagaagc

SEQ ID NO: 8669 - DNA, 17 bp, Homo sapiens
gccaagaaggagaagca

SEQ ID NO: 8670 - DNA, 17 bp, Homo sapiens
ccaagaaggagaagcac

SEQ ID NO: 8671 - DNA, 17 bp, Homo sapiens
caagaaggagaagcaca

SEQ ID NO: 8672 - DNA, 17 bp, Homo sapiens
aagaaggagaagcacaa

SEQ ID NO: 8673 - DNA, 17 bp, Homo sapiens
agaaggagaagcacaag

SEQ ID NO: 8674 - DNA, 17 bp, Homo sapiens
gaaggagaagcacaagc

SEQ ID NO: 8675 - DNA, 17 bp, Homo sapiens
aaggagaagcacaagct

SEQ ID NO: 8676 - DNA, 17 bp, Homo sapiens
aggagaagcacaagcta

SEQ ID NO: 8677 - DNA, 17 bp, Homo sapiens
ggagaagcacaagctac

SEQ ID NO: 8678 - DNA, 17 bp, Homo sapiens
gagaagcacaagctaca

SEQ ID NO: 8679 - DNA, 17 bp, Homo sapiens
agaagcacaagctacaa

SEQ ID NO: 8680 - DNA, 17 bp, Homo sapiens
gaagcacaagctacaag

SEQ ID NO: 8681 - DNA, 17 bp, Homo sapiens
aagcacaagctacaaga

SEQ ID NO: 8682 - DNA, 17 bp, Homo sapiens
agcacaagctacaagaa

SEQ ID NO: 8683 - DNA, 17 bp, Homo sapiens
gcacaagctacaagaac

SEQ ID NO: 8684 - DNA, 17 bp, Homo sapiens
cacaagctacaagaaca

SEQ ID NO: 8685 - DNA, 17 bp, Homo sapiens
acaagctacaagaacaa

SEQ ID NO: 8686 - DNA, 17 bp, Homo sapiens
caagctacaagaacaac

SEQ ID NO: 8687 - DNA, 17 bp, Homo sapiens
aagctacaagaacaact

SEQ ID NO: 8688 - DNA, 17 bp, Homo sapiens
agctacaagaacaactg

SEQ ID NO: 8689 - DNA, 17 bp, Homo sapiens
gctacaagaacaactgc

SEQ ID NO: 8690 - DNA, 17 bp, Homo sapiens
ctacaagaacaactgca

SEQ ID NO: 8691 - DNA, 17 bp, Homo sapiens
tacaagaacaactgcag

SEQ ID NO: 8692 - DNA, 17 bp, Homo sapiens
acaagaacaactgcagg

SEQ ID NO: 8693 - DNA, 17 bp, Homo sapiens
caagaacaactgcaggt

SEQ ID NO: 8694 - DNA, 17 bp, Homo sapiens
aagaacaactgcaggtg

SEQ ID NO: 8695 - DNA, 17 bp, Homo sapiens
agaacaactgcaggtgg

SEQ ID NO: 8696 - DNA, 17 bp, Homo sapiens
gaacaactgcaggtggc

SEQ ID NO: 8697 - DNA, 17 bp, Homo sapiens
aacaactgcaggtggct

SEQ ID NO: 8698 - DNA, 17 bp, Homo sapiens
acaactgcaggtggctc

SEQ ID NO: 8699 - DNA, 17 bp, Homo sapiens
caactgcaggtggctca

SEQ ID NO: 8700 - DNA, 17 bp, Homo sapiens
aactgcaggtggctcag

SEQ ID NO: 8701 - DNA, 17 bp, Homo sapiens
actgcaggtggctcaga

SEQ ID NO: 8702 - DNA, 17 bp, Homo sapiens
ctgcaggtggctcagat

SEQ ID NO: 8703 - DNA, 17 bp, Homo sapiens
tgcaggtggctcagatg

SEQ ID NO: 8704 - DNA, 17 bp, Homo sapiens
gcaggtggctcagatgc

SEQ ID NO: 8705 - DNA, 17 bp, Homo sapiens
caggtggctcagatgcg

SEQ ID NO: 8706 - DNA, 17 bp, Homo sapiens
aggtggctcagatgcgc

SEQ ID NO: 8707 - DNA, 17 bp, Homo sapiens
ggtggctcagatgcgca

SEQ ID NO: 8708 - DNA, 17 bp, Homo sapiens
gtggctcagatgcgcat

SEQ ID NO: 8709 - DNA, 17 bp, Homo sapiens
tggctcagatgcgcatc

SEQ ID NO: 8710 - DNA, 17 bp, Homo sapiens
ggctcagatgcgcatcg

SEQ ID NO: 8711 - DNA, 17 bp, Homo sapiens
gctcagatgcgcatcga

SEQ ID NO: 8712 - DNA, 17 bp, Homo sapiens
ctcagatgcgcatcgag

SEQ ID NO: 8713 - DNA, 17 bp, Homo sapiens
tcagatgcgcatcgagt

SEQ ID NO: 8714 - DNA, 17 bp, Homo sapiens
cagatgcgcatcgagta

SEQ ID NO: 8715 - DNA, 17 bp, Homo sapiens
agatgcgcatcgagtac

SEQ ID NO: 8716 - DNA, 17 bp, Homo sapiens
gatgcgcatcgagtacc

SEQ ID NO: 8717 - DNA, 17 bp, Homo sapiens
atgcgcatcgagtacct

SEQ ID NO: 8718 - DNA, 17 bp, Homo sapiens
tgcgcatcgagtacctg

SEQ ID NO: 8719 - DNA, 17 bp, Homo sapiens
gcgcatcgagtacctgg

SEQ ID NO: 8720 - DNA, 17 bp, Homo sapiens
cgcatcgagtacctgga

SEQ ID NO: 8721 - DNA, 17 bp, Homo sapiens
gcatcgagtacctggaa

SEQ ID NO: 8722 - DNA, 17 bp, Homo sapiens
catcgagtacctggaac

SEQ ID NO: 8723 - DNA, 17 bp, Homo sapiens
atcgagtacctggaaca

SEQ ID NO: 8724 - DNA, 17 bp, Homo sapiens
tcgagtacctggaacag

SEQ ID NO: 8725 - DNA, 17 bp, Homo sapiens
cgagtacctggaacagt

SEQ ID NO: 8726 - DNA, 17 bp, Homo sapiens
gagtacctggaacagtc

SEQ ID NO: 8727 - DNA, 17 bp, Homo sapiens
agtacctggaacagtcc

SEQ ID NO: 8728 - DNA, 17 bp, Homo sapiens
gtacctggaacagtcca

SEQ ID NO: 8729 - DNA, 17 bp, Homo sapiens
tacctggaacagtccac

SEQ ID NO: 8730 - DNA, 17 bp, Homo sapiens
acctggaacagtccacc

SEQ ID NO: 8731 - DNA, 17 bp, Homo sapiens
cctggaacagtccaccg

SEQ ID NO: 8732 - DNA, 17 bp, Homo sapiens
ctggaacagtccaccgt

SEQ ID NO: 8733 - DNA, 17 bp, Homo sapiens
tggaacagtccaccgtg

SEQ ID NO: 8734 - DNA, 17 bp, Homo sapiens
ggaacagtccaccgtgg

SEQ ID NO: 8735 - DNA, 17 bp, Homo sapiens
gaacagtccaccgtgga

SEQ ID NO: 8736 - DNA, 17 bp, Homo sapiens
aacagtccaccgtggat

SEQ ID NO: 8737 - DNA, 17 bp, Homo sapiens
acagtccaccgtggatc

SEQ ID NO: 8738 - DNA, 17 bp, Homo sapiens
cagtccaccgtggatcg

SEQ ID NO: 8739 - DNA, 17 bp, Homo sapiens
agtccaccgtggatcga

SEQ ID NO: 8740 - DNA, 17 bp, Homo sapiens
gtccaccgtggatcgag

SEQ ID NO: 8741 - DNA, 17 bp, Homo sapiens
tccaccgtggatcgagc

SEQ ID NO: 8742 - DNA, 17 bp, Homo sapiens
ccaccgtggatcgagcc

SEQ ID NO: 8743 - DNA, 17 bp, Homo sapiens
caccgtggatcgagcca

SEQ ID NO: 8744 - DNA, 17 bp, Homo sapiens
accgtggatcgagccat

SEQ ID NO: 8745 - DNA, 17 bp, Homo sapiens
ccgtggatcgagccatc

SEQ ID NO: 8746 - DNA, 17 bp, Homo sapiens
cgtggatcgagccatcg

SEQ ID NO: 8747 - DNA, 17 bp, Homo sapiens
gtggatcgagccatcgt

SEQ ID NO: 8748 - DNA, 17 bp, Homo sapiens
tggatcgagccatcgtc

SEQ ID NO: 8749 - DNA, 17 bp, Homo sapiens
ggatcgagccatcgtca

SEQ ID NO: 8750 - DNA, 17 bp, Homo sapiens
gatcgagccatcgtcag

SEQ ID NO: 8751 - DNA, 17 bp, Homo sapiens
atcgagccatcgtcagc

SEQ ID NO: 8752 - DNA, 17 bp, Homo sapiens
tcgagccatcgtcagca

SEQ ID NO: 8753 - DNA, 17 bp, Homo sapiens
cgagccatcgtcagcag

SEQ ID NO: 8754 - DNA, 17 bp, Homo sapiens
gagccatcgtcagcagg

SEQ ID NO: 8755 - DNA, 17 bp, Homo sapiens
agccatcgtcagcaggc

SEQ ID NO: 8756 - DNA, 17 bp, Homo sapiens
gccatcgtcagcaggca

SEQ ID NO: 8757 - DNA, 17 bp, Homo sapiens
ccatcgtcagcaggcag

SEQ ID NO: 8758 - DNA, 17 bp, Homo sapiens
catcgtcagcaggcagg

SEQ ID NO: 8759 - DNA, 17 bp, Homo sapiens
atcgtcagcaggcagga

SEQ ID NO: 8760 - DNA, 17 bp, Homo sapiens
tcgtcagcaggcaggag

SEQ ID NO: 8761 - DNA, 17 bp, Homo sapiens
cgtcagcaggcaggagg

SEQ ID NO: 8762 - DNA, 17 bp, Homo sapiens
gtcagcaggcaggaggc

SEQ ID NO: 8763 - DNA, 17 bp, Homo sapiens
tcagcaggcaggaggcg

SEQ ID NO: 8764 - DNA, 17 bp, Homo sapiens
cagcaggcaggaggcgg

SEQ ID NO: 8765 - DNA, 17 bp, Homo sapiens
agcaggcaggaggcggt

SEQ ID NO: 8766 - DNA, 17 bp, Homo sapiens
gcaggcaggaggcggtc

SEQ ID NO: 8767 - DNA, 17 bp, Homo sapiens
caggcaggaggcggtca

SEQ ID NO: 8768 - DNA, 17 bp, Homo sapiens
aggcaggaggcggtcat

SEQ ID NO: 8769 - DNA, 17 bp, Homo sapiens
ggcaggaggcggtcatc

SEQ ID NO: 8770 - DNA, 17 bp, Homo sapiens
gcaggaggcggtcatct

SEQ ID NO: 8771 - DNA, 17 bp, Homo sapiens
caggaggcggtcatctg

SEQ ID NO: 8772 - DNA, 17 bp, Homo sapiens
aggaggcggtcatctgt

SEQ ID NO: 8773 - DNA, 17 bp, Homo sapiens
ggaggcggtcatctgtg

SEQ ID NO: 8774 - DNA, 17 bp, Homo sapiens
gaggcggtcatctgtga

SEQ ID NO: 8775 - DNA, 17 bp, Homo sapiens
aggcggtcatctgtgac

SEQ ID NO: 8776 - DNA, 17 bp, Homo sapiens
ggcggtcatctgtgacc

SEQ ID NO: 8777 - DNA, 17 bp, Homo sapiens
gcggtcatctgtgacct

SEQ ID NO: 8778 - DNA, 17 bp, Homo sapiens
cggtcatctgtgaccta

SEQ ID NO: 8779 - DNA, 17 bp, Homo sapiens
ggtcatctgtgacctag

SEQ ID NO: 8780 - DNA, 17 bp, Homo sapiens
gtcatctgtgacctaga

SEQ ID NO: 8781 - DNA, 17 bp, Homo sapiens
tcatctgtgacctagag

SEQ ID NO: 8782 - DNA, 17 bp, Homo sapiens
catctgtgacctagaga

SEQ ID NO: 8783 - DNA, 17 bp, Homo sapiens
atctgtgacctagagaa

SEQ ID NO: 8784 - DNA, 17 bp, Homo sapiens
tctgtgacctagagaac

SEQ ID NO: 8785 - DNA, 17 bp, Homo sapiens
ctgtgacctagagaaca

SEQ ID NO: 8786 - DNA, 17 bp, Homo sapiens
tgtgacctagagaacaa

SEQ ID NO: 8787 - DNA, 17 bp, Homo sapiens
gtgacctagagaacaag

SEQ ID NO: 8788 - DNA, 17 bp, Homo sapiens
tgacctagagaacaaga

SEQ ID NO: 8789 - DNA, 17 bp, Homo sapiens
gacctagagaacaagac

SEQ ID NO: 8790 - DNA, 17 bp, Homo sapiens
acctagagaacaagaca

SEQ ID NO: 8791 - DNA, 17 bp, Homo sapiens
cctagagaacaagacag

SEQ ID NO: 8792 - DNA, 17 bp, Homo sapiens
ctagagaacaagacaga

SEQ ID NO: 8793 - DNA, 17 bp, Homo sapiens
tagagaacaagacagag

SEQ ID NO: 8794 - DNA, 17 bp, Homo sapiens
agagaacaagacagagt

SEQ ID NO: 8795 - DNA, 17 bp, Homo sapiens
gagaacaagacagagtt

SEQ ID NO: 8796 - DNA, 17 bp, Homo sapiens
agaacaagacagagttc

SEQ ID NO: 8797 - DNA, 17 bp, Homo sapiens
gaacaagacagagttcc

SEQ ID NO: 8798 - DNA, 17 bp, Homo sapiens
aacaagacagagttcca

SEQ ID NO: 8799 - DNA, 17 bp, Homo sapiens
acaagacagagttccag

SEQ ID NO: 8800 - DNA, 17 bp, Homo sapiens
caagacagagttccaga

SEQ ID NO: 8801 - DNA, 17 bp, Homo sapiens
aagacagagttccagaa

SEQ ID NO: 8802 - DNA, 17 bp, Homo sapiens
agacagagttccagaag

SEQ ID NO: 8803 - DNA, 17 bp, Homo sapiens
gacagagttccagaagg

SEQ ID NO: 8804 - DNA, 17 bp, Homo sapiens
acagagttccagaaggt

SEQ ID NO: 8805 - DNA, 17 bp, Homo sapiens
cagagttccagaaggtg

SEQ ID NO: 8806 - DNA, 17 bp, Homo sapiens
agagttccagaaggtgc

SEQ ID NO: 8807 - DNA, 17 bp, Homo sapiens
gagttccagaaggtgca

SEQ ID NO: 8808 - DNA, 17 bp, Homo sapiens
agttccagaaggtgcag

SEQ ID NO: 8809 - DNA, 17 bp, Homo sapiens
gttccagaaggtgcaga

SEQ ID NO: 8810 - DNA, 17 bp, Homo sapiens
ttccagaaggtgcagat

SEQ ID NO: 8811 - DNA, 17 bp, Homo sapiens
tccagaaggtgcagatt

SEQ ID NO: 8812 - DNA, 17 bp, Homo sapiens
ccagaaggtgcagatta

SEQ ID NO: 8813 - DNA, 17 bp, Homo sapiens
cagaaggtgcagattaa

SEQ ID NO: 8814 - DNA, 17 bp, Homo sapiens
agaaggtgcagattaag

SEQ ID NO: 8815 - DNA, 17 bp, Homo sapiens
gaaggtgcagattaaga

SEQ ID NO: 8816 - DNA, 17 bp, Homo sapiens
aaggtgcagattaagag

SEQ ID NO: 8817 - DNA, 17 bp, Homo sapiens
aggtgcagattaagaga

SEQ ID NO: 8818 - DNA, 17 bp, Homo sapiens
ggtgcagattaagagat

SEQ ID NO: 8819 - DNA, 17 bp, Homo sapiens
gtgcagattaagagatt

SEQ ID NO: 8820 - DNA, 17 bp, Homo sapiens
tgcagattaagagattt

SEQ ID NO: 8821 - DNA, 17 bp, Homo sapiens
gcagattaagagatttg

SEQ ID NO: 8822 - DNA, 17 bp, Homo sapiens
cagattaagagatttga

SEQ ID NO: 8823 - DNA, 17 bp, Homo sapiens
agattaagagatttgag

SEQ ID NO: 8824 - DNA, 17 bp, Homo sapiens
gattaagagatttgagg

SEQ ID NO: 8825 - DNA, 17 bp, Homo sapiens
attaagagatttgaggt

SEQ ID NO: 8826 - DNA, 17 bp, Homo sapiens
ttaagagatttgaggtc

SEQ ID NO: 8827 - DNA, 17 bp, Homo sapiens
taagagatttgaggtcc

SEQ ID NO: 8828 - DNA, 17 bp, Homo sapiens
aagagatttgaggtcct

SEQ ID NO: 8829 - DNA, 17 bp, Homo sapiens
agagatttgaggtcctg

SEQ ID NO: 8830 - DNA, 17 bp, Homo sapiens
gagatttgaggtcctgg

SEQ ID NO: 8831 - DNA, 17 bp, Homo sapiens
agatttgaggtcctggt

SEQ ID NO: 8832 - DNA, 17 bp, Homo sapiens
gatttgaggtcctggtg

SEQ ID NO: 8833 - DNA, 17 bp, Homo sapiens
atttgaggtcctggtga

SEQ ID NO: 8834 - DNA, 17 bp, Homo sapiens
tttgaggtcctggtgat

SEQ ID NO: 8835 - DNA, 17 bp, Homo sapiens
ttgaggtcctggtgatc

SEQ ID NO: 8836 - DNA, 17 bp, Homo sapiens
tgaggtcctggtgatcc

SEQ ID NO: 8837 - DNA, 17 bp, Homo sapiens
gaggtcctggtgatccg

SEQ ID NO: 8838 - DNA, 17 bp, Homo sapiens
aggtcctggtgatccgg

SEQ ID NO: 8839 - DNA, 17 bp, Homo sapiens
ggtcctggtgatccggc

SEQ ID NO: 8840 - DNA, 17 bp, Homo sapiens
gtcctggtgatccggct

SEQ ID NO: 8841 - DNA, 17 bp, Homo sapiens
tcctggtgatccggctt

SEQ ID NO: 8842 - DNA, 17 bp, Homo sapiens
cctggtgatccggcttc

SEQ ID NO: 8843 - DNA, 17 bp, Homo sapiens
ctggtgatccggcttcg

SEQ ID NO: 8844 - DNA, 17 bp, Homo sapiens
tggtgatccggcttcgg

SEQ ID NO: 8845 - DNA, 17 bp, Homo sapiens
ggtgatccggcttcggg

SEQ ID NO: 8846 - DNA, 17 bp, Homo sapiens
gtgatccggcttcggga

SEQ ID NO: 8847 - DNA, 17 bp, Homo sapiens
tgatccggcttcgggac

SEQ ID NO: 8848 - DNA, 17 bp, Homo sapiens
gatccggcttcgggaca

SEQ ID NO: 8849 - DNA, 17 bp, Homo sapiens
atccggcttcgggacag

SEQ ID NO: 8850 - DNA, 17 bp, Homo sapiens
tccggcttcgggacagc

SEQ ID NO: 8851 - DNA, 17 bp, Homo sapiens
ccggcttcgggacagcc

SEQ ID NO: 8852 - DNA, 17 bp, Homo sapiens
cggcttcgggacagcct

SEQ ID NO: 8853 - DNA, 17 bp, Homo sapiens
ggcttcgggacagcctg

SEQ ID NO: 8854 - DNA, 17 bp, Homo sapiens
gcttcgggacagcctga

SEQ ID NO: 8855 - DNA, 17 bp, Homo sapiens
cttcgggacagcctgat

SEQ ID NO: 8856 - DNA, 17 bp, Homo sapiens
ttcgggacagcctgatc

SEQ ID NO: 8857 - DNA, 17 bp, Homo sapiens
tcgggacagcctgatca

SEQ ID NO: 8858 - DNA, 17 bp, Homo sapiens
cgggacagcctgatcaa

SEQ ID NO: 8859 - DNA, 17 bp, Homo sapiens
gggacagcctgatcaag

SEQ ID NO: 8860 - DNA, 17 bp, Homo sapiens
ggacagcctgatcaaga

SEQ ID NO: 8861 - DNA, 17 bp, Homo sapiens
gacagcctgatcaagat

SEQ ID NO: 8862 - DNA, 17 bp, Homo sapiens
acagcctgatcaagatg

SEQ ID NO: 8863 - DNA, 17 bp, Homo sapiens
cagcctgatcaagatgg

SEQ ID NO: 8864 - DNA, 17 bp, Homo sapiens
agcctgatcaagatggg

SEQ ID NO: 8865 - DNA, 17 bp, Homo sapiens
gcctgatcaagatgggg

SEQ ID NO: 8866 - DNA, 17 bp, Homo sapiens
cctgatcaagatggggg

SEQ ID NO: 8867 - DNA, 17 bp, Homo sapiens
ctgatcaagatggggga

SEQ ID NO: 8868 - DNA, 17 bp, Homo sapiens
tgatcaagatgggggag

SEQ ID NO: 8869 - DNA, 17 bp, Homo sapiens
gatcaagatgggggagg

SEQ ID NO: 8870 - DNA, 17 bp, Homo sapiens
atcaagatgggggagga

SEQ ID NO: 8871 - DNA, 17 bp, Homo sapiens
tcaagatgggggaggag

SEQ ID NO: 8872 - DNA, 17 bp, Homo sapiens
caagatgggggaggagc

SEQ ID NO: 8873 - DNA, 17 bp, Homo sapiens
aagatgggggaggagct

SEQ ID NO: 8874 - DNA, 17 bp, Homo sapiens
agatgggggaggagctt

SEQ ID NO: 8875 - DNA, 17 bp, Homo sapiens
gatgggggaggagcttt

SEQ ID NO: 8876 - DNA, 17 bp, Homo sapiens
atgggggaggagctttc

SEQ ID NO: 8877 - DNA, 17 bp, Homo sapiens
tgggggaggagctttca

SEQ ID NO: 8878 - DNA, 17 bp, Homo sapiens
gggggaggagctttcac

SEQ ID NO: 8879 - DNA, 17 bp, Homo sapiens
ggggaggagctttcaca

SEQ ID NO: 8880 - DNA, 17 bp, Homo sapiens
gggaggagctttcacag

SEQ ID NO: 8881 - DNA, 17 bp, Homo sapiens
ggaggagctttcacagg

SEQ ID NO: 8882 - DNA, 17 bp, Homo sapiens
gaggagctttcacaggc

SEQ ID NO: 8883 - DNA, 17 bp, Homo sapiens
aggagctttcacaggcg

SEQ ID NO: 8884 - DNA, 17 bp, Homo sapiens
ggagctttcacaggcgg

SEQ ID NO: 8885 - DNA, 17 bp, Homo sapiens
gagctttcacaggcggc

SEQ ID NO: 8886 - DNA, 17 bp, Homo sapiens
agctttcacaggcggcc

SEQ ID NO: 8887 - DNA, 17 bp, Homo sapiens
gctttcacaggcggcca

SEQ ID NO: 8888 - DNA, 17 bp, Homo sapiens
ctttcacaggcggccac

SEQ ID NO: 8889 - DNA, 17 bp, Homo sapiens
tttcacaggcggccacc

SEQ ID NO: 8890 - DNA, 17 bp, Homo sapiens
ttcacaggcggccacct

SEQ ID NO: 8891 - DNA, 17 bp, Homo sapiens
tcacaggcggccacctc

SEQ ID NO: 8892 - DNA, 17 bp, Homo sapiens
cacaggcggccacctcc

SEQ ID NO: 8893 - DNA, 17 bp, Homo sapiens
acaggcggccacctccg

SEQ ID NO: 8894 - DNA, 17 bp, Homo sapiens
caggcggccacctccga

SEQ ID NO: 8895 - DNA, 17 bp, Homo sapiens
aggcggccacctccgag

SEQ ID NO: 8896 - DNA, 17 bp, Homo sapiens
ggcggccacctccgagt

SEQ ID NO: 8897 - DNA, 17 bp, Homo sapiens
gcggccacctccgagtc

SEQ ID NO: 8898 - DNA, 17 bp, Homo sapiens
cggccacctccgagtcc

SEQ ID NO: 8899 - DNA, 17 bp, Homo sapiens
ggccacctccgagtccc

SEQ ID NO: 8900 - DNA, 17 bp, Homo sapiens
gccacctccgagtccca

SEQ ID NO: 8901 - DNA, 17 bp, Homo sapiens
ccacctccgagtcccag

SEQ ID NO: 8902 - DNA, 17 bp, Homo sapiens
cacctccgagtcccagc

SEQ ID NO: 8903 - DNA, 17 bp, Homo sapiens
acctccgagtcccagca

SEQ ID NO: 8904 - DNA, 17 bp, Homo sapiens
cctccgagtcccagcag

SEQ ID NO: 8905 - DNA, 17 bp, Homo sapiens
ctccgagtcccagcagc

SEQ ID NO: 8906 - DNA, 17 bp, Homo sapiens
tccgagtcccagcagcg

SEQ ID NO: 8907 - DNA, 17 bp, Homo sapiens
ccgagtcccagcagcgg

SEQ ID NO: 8908 - DNA, 17 bp, Homo sapiens
cgagtcccagcagcggg

SEQ ID NO: 8909 - DNA, 17 bp, Homo sapiens
gagtcccagcagcggga

SEQ ID NO: 8910 - DNA, 17 bp, Homo sapiens
agtcccagcagcgggag

SEQ ID NO: 8911 - DNA, 17 bp, Homo sapiens
gtcccagcagcgggaga

SEQ ID NO: 8912 - DNA, 17 bp, Homo sapiens
tcccagcagcgggagag

SEQ ID NO: 8913 - DNA, 17 bp, Homo sapiens
cccagcagcgggagagc

SEQ ID NO: 8914 - DNA, 17 bp, Homo sapiens
ccagcagcgggagagca

SEQ ID NO: 8915 - DNA, 17 bp, Homo sapiens
cagcagcgggagagcag

SEQ ID NO: 8916 - DNA, 17 bp, Homo sapiens
agcagcgggagagcagc

SEQ ID NO: 8917 - DNA, 17 bp, Homo sapiens
gcagcgggagagcagcc

SEQ ID NO: 8918 - DNA, 17 bp, Homo sapiens
cagcgggagagcagcca

SEQ ID NO: 8919 - DNA, 17 bp, Homo sapiens
agcgggagagcagccag

SEQ ID NO: 8920 - DNA, 17 bp, Homo sapiens
gcgggagagcagccagt

SEQ ID NO: 8921 - DNA, 17 bp, Homo sapiens
cgggagagcagccagta

SEQ ID NO: 8922 - DNA, 17 bp, Homo sapiens
gggagagcagccagtac

SEQ ID NO: 8923 - DNA, 17 bp, Homo sapiens
ggagagcagccagtact

SEQ ID NO: 8924 - DNA, 17 bp, Homo sapiens
gagagcagccagtacta

SEQ ID NO: 8925 - DNA, 17 bp, Homo sapiens
agagcagccagtactac

SEQ ID NO: 8926 - DNA, 17 bp, Homo sapiens
gagcagccagtactacc

SEQ ID NO: 8927 - DNA, 17 bp, Homo sapiens
agcagccagtactacca

SEQ ID NO: 8928 - DNA, 17 bp, Homo sapiens
gcagccagtactaccag

SEQ ID NO: 8929 - DNA, 17 bp, Homo sapiens
cagccagtactaccagc

SEQ ID NO: 8930 - DNA, 17 bp, Homo sapiens
agccagtactaccagcg

SEQ ID NO: 8931 - DNA, 17 bp, Homo sapiens
gccagtactaccagcgg

SEQ ID NO: 8932 - DNA, 17 bp, Homo sapiens
ccagtactaccagcggc

SEQ ID NO: 8933 - DNA, 17 bp, Homo sapiens
cagtactaccagcggcg

SEQ ID NO: 8934 - DNA, 17 bp, Homo sapiens
agtactaccagcggcgc

SEQ ID NO: 8935 - DNA, 17 bp, Homo sapiens
gtactaccagcggcgcc

SEQ ID NO: 8936 - DNA, 17 bp, Homo sapiens
tactaccagcggcgcct

SEQ ID NO: 8937 - DNA, 17 bp, Homo sapiens
actaccagcggcgcctg

SEQ ID NO: 8938 - DNA, 17 bp, Homo sapiens
ctaccagcggcgcctgg

SEQ ID NO: 8939 - DNA, 17 bp, Homo sapiens
taccagcggcgcctgga

SEQ ID NO: 8940 - DNA, 17 bp, Homo sapiens
accagcggcgcctggaa

SEQ ID NO: 8941 - DNA, 17 bp, Homo sapiens
ccagcggcgcctggaag

SEQ ID NO: 8942 - DNA, 17 bp, Homo sapiens
cagcggcgcctggaaga

SEQ ID NO: 8943 - DNA, 17 bp, Homo sapiens
agcggcgcctggaagag

SEQ ID NO: 8944 - DNA, 17 bp, Homo sapiens
gcggcgcctggaagagc

SEQ ID NO: 8945 - DNA, 17 bp, Homo sapiens
cggcgcctggaagagct

SEQ ID NO: 8946 - DNA, 17 bp, Homo sapiens
ggcgcctggaagagctg

SEQ ID NO: 8947 - DNA, 17 bp, Homo sapiens
gcgcctggaagagctga

SEQ ID NO: 8948 - DNA, 17 bp, Homo sapiens
cgcctggaagagctgaa

SEQ ID NO: 8949 - DNA, 17 bp, Homo sapiens
gcctggaagagctgaag

SEQ ID NO: 8950 - DNA, 17 bp, Homo sapiens
cctggaagagctgaagg

SEQ ID NO: 8951 - DNA, 17 bp, Homo sapiens
ctggaagagctgaaggc

SEQ ID NO: 8952 - DNA, 17 bp, Homo sapiens
tggaagagctgaaggcc

SEQ ID NO: 8953 - DNA, 17 bp, Homo sapiens
ggaagagctgaaggccg

SEQ ID NO: 8954 - DNA, 17 bp, Homo sapiens
gaagagctgaaggccga

SEQ ID NO: 8955 - DNA, 17 bp, Homo sapiens
aagagctgaaggccgac

SEQ ID NO: 8956 - DNA, 17 bp, Homo sapiens
agagctgaaggccgaca

SEQ ID NO: 8957 - DNA, 17 bp, Homo sapiens
gagctgaaggccgacat

SEQ ID NO: 8958 - DNA, 17 bp, Homo sapiens
agctgaaggccgacatg

SEQ ID NO: 8959 - DNA, 17 bp, Homo sapiens
gctgaaggccgacatgg

SEQ ID NO: 8960 - DNA, 17 bp, Homo sapiens
ctgaaggccgacatgga

SEQ ID NO: 8961 - DNA, 17 bp, Homo sapiens
tgaaggccgacatggaa

SEQ ID NO: 8962 - DNA, 17 bp, Homo sapiens
gaaggccgacatggaag

SEQ ID NO: 8963 - DNA, 17 bp, Homo sapiens
aaggccgacatggaaga

SEQ ID NO: 8964 - DNA, 17 bp, Homo sapiens
aggccgacatggaagag

SEQ ID NO: 8965 - DNA, 17 bp, Homo sapiens
ggccgacatggaagagc

SEQ ID NO: 8966 - DNA, 17 bp, Homo sapiens
gccgacatggaagagct

SEQ ID NO: 8967 - DNA, 17 bp, Homo sapiens
ccgacatggaagagctg

SEQ ID NO: 8968 - DNA, 17 bp, Homo sapiens
cgacatggaagagctgg

SEQ ID NO: 8969 - DNA, 17 bp, Homo sapiens
gacatggaagagctggt

SEQ ID NO: 8970 - DNA, 17 bp, Homo sapiens
acatggaagagctggtg

SEQ ID NO: 8971 - DNA, 17 bp, Homo sapiens
catggaagagctggtgc

SEQ ID NO: 8972 - DNA, 17 bp, Homo sapiens
atggaagagctggtgca

SEQ ID NO: 8973 - DNA, 17 bp, Homo sapiens
tggaagagctggtgcag

SEQ ID NO: 8974 - DNA, 17 bp, Homo sapiens
ggaagagctggtgcagc

SEQ ID NO: 8975 - DNA, 17 bp, Homo sapiens
gaagagctggtgcagcg

SEQ ID NO: 8976 - DNA, 17 bp, Homo sapiens
aagagctggtgcagcgg

SEQ ID NO: 8977 - DNA, 17 bp, Homo sapiens
agagctggtgcagcggg

SEQ ID NO: 8978 - DNA, 17 bp, Homo sapiens
gagctggtgcagcggga

SEQ ID NO: 8979 - DNA, 17 bp, Homo sapiens
agctggtgcagcgggag

SEQ ID NO: 8980 - DNA, 17 bp, Homo sapiens
gctggtgcagcgggagg

SEQ ID NO: 8981 - DNA, 17 bp, Homo sapiens
ctggtgcagcgggaggc

SEQ ID NO: 8982 - DNA, 17 bp, Homo sapiens
tggtgcagcgggaggca

SEQ ID NO: 8983 - DNA, 17 bp, Homo sapiens
ggtgcagcgggaggcag

SEQ ID NO: 8984 - DNA, 17 bp, Homo sapiens
gtgcagcgggaggcaga

SEQ ID NO: 8985 - DNA, 17 bp, Homo sapiens
tgcagcgggaggcagag

SEQ ID NO: 8986 - DNA, 17 bp, Homo sapiens
gcagcgggaggcagagg

SEQ ID NO: 8987 - DNA, 17 bp, Homo sapiens
cagcgggaggcagaggc

SEQ ID NO: 8988 - DNA, 17 bp, Homo sapiens
agcgggaggcagaggcc

SEQ ID NO: 8989 - DNA, 17 bp, Homo sapiens
gcgggaggcagaggcca

SEQ ID NO: 8990 - DNA, 17 bp, Homo sapiens
cgggaggcagaggccag

SEQ ID NO: 8991 - DNA, 17 bp, Homo sapiens
gggaggcagaggccagc

SEQ ID NO: 8992 - DNA, 17 bp, Homo sapiens
ggaggcagaggccagcc

SEQ ID NO: 8993 - DNA, 17 bp, Homo sapiens
gaggcagaggccagccg

SEQ ID NO: 8994 - DNA, 17 bp, Homo sapiens
aggcagaggccagccgg

SEQ ID NO: 8995 - DNA, 17 bp, Homo sapiens
ggcagaggccagccggc

SEQ ID NO: 8996 - DNA, 17 bp, Homo sapiens
gcagaggccagccggcg

SEQ ID NO: 8997 - DNA, 17 bp, Homo sapiens
cagaggccagccggcgg

SEQ ID NO: 8998 - DNA, 17 bp, Homo sapiens
agaggccagccggcggt

SEQ ID NO: 8999 - DNA, 17 bp, Homo sapiens
gaggccagccggcggtg

SEQ ID NO: 9000 - DNA, 17 bp, Homo sapiens
aggccagccggcggtgc

SEQ ID NO: 9001 - DNA, 17 bp, Homo sapiens
ggccagccggcggtgca

SEQ ID NO: 9002 - DNA, 17 bp, Homo sapiens
gccagccggcggtgcat

SEQ ID NO: 9003 - DNA, 17 bp, Homo sapiens
ccagccggcggtgcatg

SEQ ID NO: 9004 - DNA, 17 bp, Homo sapiens
cagccggcggtgcatgg

SEQ ID NO: 9005 - DNA, 17 bp, Homo sapiens
agccggcggtgcatgga

SEQ ID NO: 9006 - DNA, 17 bp, Homo sapiens
gccggcggtgcatggag

SEQ ID NO: 9007 - DNA, 17 bp, Homo sapiens
ccggcggtgcatggagc

SEQ ID NO: 9008 - DNA, 17 bp, Homo sapiens
cggcggtgcatggagct

SEQ ID NO: 9009 - DNA, 17 bp, Homo sapiens
ggcggtgcatggagctg

SEQ ID NO: 9010 - DNA, 17 bp, Homo sapiens
gcggtgcatggagctgg

SEQ ID NO: 9011 - DNA, 17 bp, Homo sapiens
cggtgcatggagctgga

SEQ ID NO: 9012 - DNA, 17 bp, Homo sapiens
ggtgcatggagctggag

SEQ ID NO: 9013 - DNA, 17 bp, Homo sapiens
gtgcatggagctggaga

SEQ ID NO: 9014 - DNA, 17 bp, Homo sapiens
tgcatggagctggagaa

SEQ ID NO: 9015 - DNA, 17 bp, Homo sapiens
gcatggagctggagaag

SEQ ID NO: 9016 - DNA, 17 bp, Homo sapiens
catggagctggagaagt

SEQ ID NO: 9017 - DNA, 17 bp, Homo sapiens
atggagctggagaagta

SEQ ID NO: 9018 - DNA, 17 bp, Homo sapiens
tggagctggagaagtac

SEQ ID NO: 9019 - DNA, 17 bp, Homo sapiens
ggagctggagaagtacg

SEQ ID NO: 9020 - DNA, 17 bp, Homo sapiens
gagctggagaagtacgt

SEQ ID NO: 9021 - DNA, 17 bp, Homo sapiens
agctggagaagtacgtg

SEQ ID NO: 9022 - DNA, 17 bp, Homo sapiens
gctggagaagtacgtgg

SEQ ID NO: 9023 - DNA, 17 bp, Homo sapiens
ctggagaagtacgtgga

SEQ ID NO: 9024 - DNA, 17 bp, Homo sapiens
tggagaagtacgtggag

SEQ ID NO: 9025 - DNA, 17 bp, Homo sapiens
ggagaagtacgtggagg

SEQ ID NO: 9026 - DNA, 17 bp, Homo sapiens
gagaagtacgtggagga

SEQ ID NO: 9027 - DNA, 17 bp, Homo sapiens
agaagtacgtggaggaa

SEQ ID NO: 9028 - DNA, 17 bp, Homo sapiens
gaagtacgtggaggaac

SEQ ID NO: 9029 - DNA, 17 bp, Homo sapiens
aagtacgtggaggaact

SEQ ID NO: 9030 - DNA, 17 bp, Homo sapiens
agtacgtggaggaactt

SEQ ID NO: 9031 - DNA, 17 bp, Homo sapiens
gtacgtggaggaacttg

SEQ ID NO: 9032 - DNA, 17 bp, Homo sapiens
tacgtggaggaacttgc

SEQ ID NO: 9033 - DNA, 17 bp, Homo sapiens
acgtggaggaacttgca

SEQ ID NO: 9034 - DNA, 17 bp, Homo sapiens
cgtggaggaacttgcag

SEQ ID NO: 9035 - DNA, 17 bp, Homo sapiens
gtggaggaacttgcagc

SEQ ID NO: 9036 - DNA, 17 bp, Homo sapiens
tggaggaacttgcagca

SEQ ID NO: 9037 - DNA, 17 bp, Homo sapiens
ggaggaacttgcagcag

SEQ ID NO: 9038 - DNA, 17 bp, Homo sapiens
gaggaacttgcagcagt

SEQ ID NO: 9039 - DNA, 17 bp, Homo sapiens
aggaacttgcagcagtg

SEQ ID NO: 9040 - DNA, 17 bp, Homo sapiens
ggaacttgcagcagtga

SEQ ID NO: 9041 - DNA, 17 bp, Homo sapiens
gaacttgcagcagtgag

SEQ ID NO: 9042 - DNA, 17 bp, Homo sapiens
aacttgcagcagtgagg

SEQ ID NO: 9043 - DNA, 17 bp, Homo sapiens
acttgcagcagtgaggc

SEQ ID NO: 9044 - DNA, 17 bp, Homo sapiens
cttgcagcagtgaggca

SEQ ID NO: 9045 - DNA, 17 bp, Homo sapiens
ttgcagcagtgaggcaa

SEQ ID NO: 9046 - DNA, 17 bp, Homo sapiens
tgcagcagtgaggcaaa

SEQ ID NO: 9047 - DNA, 17 bp, Homo sapiens
gcagcagtgaggcaaac

SEQ ID NO: 9048 - DNA, 17 bp, Homo sapiens
cagcagtgaggcaaacc

SEQ ID NO: 9049 - DNA, 17 bp, Homo sapiens
agcagtgaggcaaaccc

SEQ ID NO: 9050 - DNA, 17 bp, Homo sapiens
gcagtgaggcaaaccct

SEQ ID NO: 9051 - DNA, 17 bp, Homo sapiens
cagtgaggcaaaccctc

SEQ ID NO: 9052 - DNA, 17 bp, Homo sapiens
agtgaggcaaaccctcc

SEQ ID NO: 9053 - DNA, 17 bp, Homo sapiens
gtgaggcaaaccctcca

SEQ ID NO: 9054 - DNA, 17 bp, Homo sapiens
tgaggcaaaccctccag

SEQ ID NO: 9055 - DNA, 17 bp, Homo sapiens
gaggcaaaccctccaga

SEQ ID NO: 9056 - DNA, 17 bp, Homo sapiens
aggcaaaccctccagac

SEQ ID NO: 9057 - DNA, 17 bp, Homo sapiens
ggcaaaccctccagaca

SEQ ID NO: 9058 - DNA, 17 bp, Homo sapiens
gcaaaccctccagacag

SEQ ID NO: 9059 - DNA, 17 bp, Homo sapiens
caaaccctccagacaga

SEQ ID NO: 9060 - DNA, 17 bp, Homo sapiens
aaaccctccagacagac

SEQ ID NO: 9061 - DNA, 17 bp, Homo sapiens
aaccctccagacagacc

SEQ ID NO: 9062 - DNA, 17 bp, Homo sapiens
accctccagacagacct

SEQ ID NO: 9063 - DNA, 17 bp, Homo sapiens
ccctccagacagacctg

SEQ ID NO: 9064 - DNA, 17 bp, Homo sapiens
cctccagacagacctgg

SEQ ID NO: 9065 - DNA, 17 bp, Homo sapiens
ctccagacagacctgga

SEQ ID NO: 9066 - DNA, 17 bp, Homo sapiens
tccagacagacctggag

SEQ ID NO: 9067 - DNA, 17 bp, Homo sapiens
ccagacagacctggaga

SEQ ID NO: 9068 - DNA, 17 bp, Homo sapiens
cagacagacctggagac

SEQ ID NO: 9069 - DNA, 17 bp, Homo sapiens
agacagacctggagaca

SEQ ID NO: 9070 - DNA, 17 bp, Homo sapiens
gacagacctggagacat

SEQ ID NO: 9071 - DNA, 17 bp, Homo sapiens
acagacctggagacatc

SEQ ID NO: 9072 - DNA, 17 bp, Homo sapiens
cagacctggagacatcc

SEQ ID NO: 9073 - DNA, 17 bp, Homo sapiens
agacctggagacatcca

SEQ ID NO: 9074 - DNA, 17 bp, Homo sapiens
gacctggagacatccat

SEQ ID NO: 9075 - DNA, 17 bp, Homo sapiens
acctggagacatccatt

SEQ ID NO: 9076 - DNA, 17 bp, Homo sapiens
cctggagacatccattc

SEQ ID NO: 9077 - DNA, 17 bp, Homo sapiens
ctggagacatccattcg

SEQ ID NO: 9078 - DNA, 17 bp, Homo sapiens
tggagacatccattcgg

SEQ ID NO: 9079 - DNA, 17 bp, Homo sapiens
ggagacatccattcggc

SEQ ID NO: 9080 - DNA, 17 bp, Homo sapiens
gagacatccattcggcg

SEQ ID NO: 9081 - DNA, 17 bp, Homo sapiens
agacatccattcggcgg

SEQ ID NO: 9082 - DNA, 17 bp, Homo sapiens
gacatccattcggcgga

SEQ ID NO: 9083 - DNA, 17 bp, Homo sapiens
acatccattcggcggat

SEQ ID NO: 9084 - DNA, 17 bp, Homo sapiens
catccattcggcggatt

SEQ ID NO: 9085 - DNA, 17 bp, Homo sapiens
atccattcggcggattg

SEQ ID NO: 9086 - DNA, 17 bp, Homo sapiens
tccattcggcggattgc

SEQ ID NO: 9087 - DNA, 17 bp, Homo sapiens
ccattcggcggattgcc

SEQ ID NO: 9088 - DNA, 17 bp, Homo sapiens
cattcggcggattgccg

SEQ ID NO: 9089 - DNA, 17 bp, Homo sapiens
attcggcggattgccga

SEQ ID NO: 9090 - DNA, 17 bp, Homo sapiens
ttcggcggattgccgac

SEQ ID NO: 9091 - DNA, 17 bp, Homo sapiens
tcggcggattgccgacc

SEQ ID NO: 9092 - DNA, 17 bp, Homo sapiens
cggcggattgccgacct

SEQ ID NO: 9093 - DNA, 17 bp, Homo sapiens
ggcggattgccgacctg

SEQ ID NO: 9094 - DNA, 17 bp, Homo sapiens
gcggattgccgacctgc

SEQ ID NO: 9095 - DNA, 17 bp, Homo sapiens
cggattgccgacctgca

SEQ ID NO: 9096 - DNA, 17 bp, Homo sapiens
ggattgccgacctgcag

SEQ ID NO: 9097 - DNA, 17 bp, Homo sapiens
gattgccgacctgcagg

SEQ ID NO: 9098 - DNA, 17 bp, Homo sapiens
attgccgacctgcaggc

SEQ ID NO: 9099 - DNA, 17 bp, Homo sapiens
ttgccgacctgcaggct

SEQ ID NO: 9100 - DNA, 17 bp, Homo sapiens
tgccgacctgcaggctg

SEQ ID NO: 9101 - DNA, 17 bp, Homo sapiens
gccgacctgcaggctgc

SEQ ID NO: 9102 - DNA, 17 bp, Homo sapiens
ccgacctgcaggctgcc

SEQ ID NO: 9103 - DNA, 17 bp, Homo sapiens
cgacctgcaggctgcct

SEQ ID NO: 9104 - DNA, 17 bp, Homo sapiens
gacctgcaggctgcctt

SEQ ID NO: 9105 - DNA, 17 bp, Homo sapiens
acctgcaggctgccttg

SEQ ID NO: 9106 - DNA, 17 bp, Homo sapiens
cctgcaggctgccttgg

SEQ ID NO: 9107 - DNA, 17 bp, Homo sapiens
ctgcaggctgccttgga

SEQ ID NO: 9108 - DNA, 17 bp, Homo sapiens
tgcaggctgccttggaa

SEQ ID NO: 9109 - DNA, 17 bp, Homo sapiens
gcaggctgccttggaag

SEQ ID NO: 9110 - DNA, 17 bp, Homo sapiens
caggctgccttggaaga

SEQ ID NO: 9111 - DNA, 17 bp, Homo sapiens
aggctgccttggaagaa

SEQ ID NO: 9112 - DNA, 17 bp, Homo sapiens
ggctgccttggaagaag

SEQ ID NO: 9113 - DNA, 17 bp, Homo sapiens
gctgccttggaagaagt

SEQ ID NO: 9114 - DNA, 17 bp, Homo sapiens
ctgccttggaagaagtg

SEQ ID NO: 9115 - DNA, 17 bp, Homo sapiens
tgccttggaagaagtgg

SEQ ID NO: 9116 - DNA, 17 bp, Homo sapiens
gccttggaagaagtggc

SEQ ID NO: 9117 - DNA, 17 bp, Homo sapiens
ccttggaagaagtggca

SEQ ID NO: 9118 - DNA, 17 bp, Homo sapiens
cttggaagaagtggcat

SEQ ID NO: 9119 - DNA, 17 bp, Homo sapiens
ttggaagaagtggcatc

SEQ ID NO: 9120 - DNA, 17 bp, Homo sapiens
tggaagaagtggcatcc

SEQ ID NO: 9121 - DNA, 17 bp, Homo sapiens
ggaagaagtggcatcca

SEQ ID NO: 9122 - DNA, 17 bp, Homo sapiens
gaagaagtggcatccag

SEQ ID NO: 9123 - DNA, 17 bp, Homo sapiens
aagaagtggcatccagt

SEQ ID NO: 9124 - DNA, 17 bp, Homo sapiens
agaagtggcatccagtg

SEQ ID NO: 9125 - DNA, 17 bp, Homo sapiens
gaagtggcatccagtga

SEQ ID NO: 9126 - DNA, 17 bp, Homo sapiens
aagtggcatccagtgac

SEQ ID NO: 9127 - DNA, 17 bp, Homo sapiens
agtggcatccagtgaca

SEQ ID NO: 9128 - DNA, 17 bp, Homo sapiens
gtggcatccagtgacag

SEQ ID NO: 9129 - DNA, 17 bp, Homo sapiens
tggcatccagtgacagt

SEQ ID NO: 9130 - DNA, 17 bp, Homo sapiens
ggcatccagtgacagtg

SEQ ID NO: 9131 - DNA, 17 bp, Homo sapiens
gcatccagtgacagtga

SEQ ID NO: 9132 - DNA, 17 bp, Homo sapiens
catccagtgacagtgat

SEQ ID NO: 9133 - DNA, 17 bp, Homo sapiens
atccagtgacagtgata

SEQ ID NO: 9134 - DNA, 17 bp, Homo sapiens
tccagtgacagtgatac

SEQ ID NO: 9135 - DNA, 17 bp, Homo sapiens
ccagtgacagtgatact

SEQ ID NO: 9136 - DNA, 17 bp, Homo sapiens
cagtgacagtgatactg

SEQ ID NO: 9137 - DNA, 17 bp, Homo sapiens
agtgacagtgatactga

SEQ ID NO: 9138 - DNA, 17 bp, Homo sapiens
gtgacagtgatactgag

SEQ ID NO: 9139 - DNA, 17 bp, Homo sapiens
tgacagtgatactgaga

SEQ ID NO: 9140 - DNA, 17 bp, Homo sapiens
gacagtgatactgagag

SEQ ID NO: 9141 - DNA, 17 bp, Homo sapiens
acagtgatactgagagt

SEQ ID NO: 9142 - DNA, 17 bp, Homo sapiens
cagtgatactgagagtg

SEQ ID NO: 9143 - DNA, 17 bp, Homo sapiens
agtgatactgagagtgt

SEQ ID NO: 9144 - DNA, 17 bp, Homo sapiens
gtgatactgagagtgtc

SEQ ID NO: 9145 - DNA, 17 bp, Homo sapiens
tgatactgagagtgtcc

SEQ ID NO: 9146 - DNA, 17 bp, Homo sapiens
gatactgagagtgtcca

SEQ ID NO: 9147 - DNA, 17 bp, Homo sapiens
atactgagagtgtccag

SEQ ID NO: 9148 - DNA, 17 bp, Homo sapiens
tactgagagtgtccaga

SEQ ID NO: 9149 - DNA, 17 bp, Homo sapiens
actgagagtgtccagac

SEQ ID NO: 9150 - DNA, 17 bp, Homo sapiens
ctgagagtgtccagacg

SEQ ID NO: 9151 - DNA, 17 bp, Homo sapiens
tgagagtgtccagacgg

SEQ ID NO: 9152 - DNA, 17 bp, Homo sapiens
gagagtgtccagacggc

SEQ ID NO: 9153 - DNA, 17 bp, Homo sapiens
agagtgtccagacggca

SEQ ID NO: 9154 - DNA, 17 bp, Homo sapiens
gagtgtccagacggcag

SEQ ID NO: 9155 - DNA, 17 bp, Homo sapiens
agtgtccagacggcagt

SEQ ID NO: 9156 - DNA, 17 bp, Homo sapiens
gtgtccagacggcagtg

SEQ ID NO: 9157 - DNA, 17 bp, Homo sapiens
tgtccagacggcagtgg

SEQ ID NO: 9158 - DNA, 17 bp, Homo sapiens
gtccagacggcagtgga

SEQ ID NO: 9159 - DNA, 17 bp, Homo sapiens
tccagacggcagtggat

SEQ ID NO: 9160 - DNA, 17 bp, Homo sapiens
ccagacggcagtggatt

SEQ ID NO: 9161 - DNA, 17 bp, Homo sapiens
cagacggcagtggattg

SEQ ID NO: 9162 - DNA, 17 bp, Homo sapiens
agacggcagtggattgt

SEQ ID NO: 9163 - DNA, 17 bp, Homo sapiens
gacggcagtggattgtg

SEQ ID NO: 9164 - DNA, 17 bp, Homo sapiens
acggcagtggattgtgg

SEQ ID NO: 9165 - DNA, 17 bp, Homo sapiens
cggcagtggattgtggc

SEQ ID NO: 9166 - DNA, 17 bp, Homo sapiens
ggcagtggattgtggca

SEQ ID NO: 9167 - DNA, 17 bp, Homo sapiens
gcagtggattgtggcag

SEQ ID NO: 9168 - DNA, 17 bp, Homo sapiens
cagtggattgtggcagc

SEQ ID NO: 9169 - DNA, 17 bp, Homo sapiens
agtggattgtggcagca

SEQ ID NO: 9170 - DNA, 17 bp, Homo sapiens
gtggattgtggcagcag

SEQ ID NO: 9171 - DNA, 17 bp, Homo sapiens
tggattgtggcagcagc

SEQ ID NO: 9172 - DNA, 17 bp, Homo sapiens
ggattgtggcagcagcg

SEQ ID NO: 9173 - DNA, 17 bp, Homo sapiens
gattgtggcagcagcgg

SEQ ID NO: 9174 - DNA, 17 bp, Homo sapiens
attgtggcagcagcggc

SEQ ID NO: 9175 - DNA, 17 bp, Homo sapiens
ttgtggcagcagcggcc

SEQ ID NO: 9176 - DNA, 17 bp, Homo sapiens
tgtggcagcagcggccg

SEQ ID NO: 9177 - DNA, 17 bp, Homo sapiens
gtggcagcagcggccga

SEQ ID NO: 9178 - DNA, 17 bp, Homo sapiens
tggcagcagcggccgaa

SEQ ID NO: 9179 - DNA, 17 bp, Homo sapiens
ggcagcagcggccgaaa

SEQ ID NO: 9180 - DNA, 17 bp, Homo sapiens
gcagcagcggccgaaaa

SEQ ID NO: 9181 - DNA, 17 bp, Homo sapiens
cagcagcggccgaaaag

SEQ ID NO: 9182 - DNA, 17 bp, Homo sapiens
agcagcggccgaaaaga

SEQ ID NO: 9183 - DNA, 17 bp, Homo sapiens
gcagcggccgaaaagag

SEQ ID NO: 9184 - DNA, 17 bp, Homo sapiens
cagcggccgaaaagaga

SEQ ID NO: 9185 - DNA, 17 bp, Homo sapiens
agcggccgaaaagagat

SEQ ID NO: 9186 - DNA, 17 bp, Homo sapiens
gcggccgaaaagagatg

SEQ ID NO: 9187 - DNA, 17 bp, Homo sapiens
cggccgaaaagagatgg

SEQ ID NO: 9188 - DNA, 17 bp, Homo sapiens
ggccgaaaagagatgga

SEQ ID NO: 9189 - DNA, 17 bp, Homo sapiens
gccgaaaagagatggat

SEQ ID NO: 9190 - DNA, 17 bp, Homo sapiens
ccgaaaagagatggata

SEQ ID NO: 9191 - DNA, 17 bp, Homo sapiens
cgaaaagagatggataa

SEQ ID NO: 9192 - DNA, 17 bp, Homo sapiens
gaaaagagatggataac

SEQ ID NO: 9193 - DNA, 17 bp, Homo sapiens
aaaagagatggataacg

SEQ ID NO: 9194 - DNA, 17 bp, Homo sapiens
aaagagatggataacgt

SEQ ID NO: 9195 - DNA, 17 bp, Homo sapiens
aagagatggataacgtc

SEQ ID NO: 9196 - DNA, 17 bp, Homo sapiens
agagatggataacgtct

SEQ ID NO: 9197 - DNA, 17 bp, Homo sapiens
gagatggataacgtctc

SEQ ID NO: 9198 - DNA, 17 bp, Homo sapiens
agatggataacgtctcc

SEQ ID NO: 9199 - DNA, 17 bp, Homo sapiens
gatggataacgtctcca

SEQ ID NO: 9200 - DNA, 17 bp, Homo sapiens
atggataacgtctccat

SEQ ID NO: 9201 - DNA, 17 bp, Homo sapiens
tggataacgtctccatc

SEQ ID NO: 9202 - DNA, 17 bp, Homo sapiens
ggataacgtctccatcc

SEQ ID NO: 9203 - DNA, 17 bp, Homo sapiens
gataacgtctccatcct

SEQ ID NO: 9204 - DNA, 17 bp, Homo sapiens
ataacgtctccatcctc

SEQ ID NO: 9205 - DNA, 17 bp, Homo sapiens
taacgtctccatcctca

SEQ ID NO: 9206 - DNA, 17 bp, Homo sapiens
aacgtctccatcctcag

SEQ ID NO: 9207 - DNA, 17 bp, Homo sapiens
acgtctccatcctcagc

SEQ ID NO: 9208 - DNA, 17 bp, Homo sapiens
cgtctccatcctcagct

SEQ ID NO: 9209 - DNA, 17 bp, Homo sapiens
gtctccatcctcagctc

SEQ ID NO: 9210 - DNA, 17 bp, Homo sapiens
tctccatcctcagctcc

SEQ ID NO: 9211 - DNA, 17 bp, Homo sapiens
ctccatcctcagctccc

SEQ ID NO: 9212 - DNA, 17 bp, Homo sapiens
tccatcctcagctccca

SEQ ID NO: 9213 - DNA, 17 bp, Homo sapiens
ccatcctcagctcccag

SEQ ID NO: 9214 - DNA, 17 bp, Homo sapiens
catcctcagctcccagc

SEQ ID NO: 9215 - DNA, 17 bp, Homo sapiens
atcctcagctcccagcc

SEQ ID NO: 9216 - DNA, 17 bp, Homo sapiens
tcctcagctcccagcca

SEQ ID NO: 9217 - DNA, 17 bp, Homo sapiens
cctcagctcccagccag

SEQ ID NO: 9218 - DNA, 17 bp, Homo sapiens
ctcagctcccagccaga

SEQ ID NO: 9219 - DNA, 17 bp, Homo sapiens
tcagctcccagccagag

SEQ ID NO: 9220 - DNA, 17 bp, Homo sapiens
cagctcccagccagagg

SEQ ID NO: 9221 - DNA, 17 bp, Homo sapiens
agctcccagccagaggg

SEQ ID NO: 9222 - DNA, 17 bp, Homo sapiens
gctcccagccagagggc

SEQ ID NO: 9223 - DNA, 17 bp, Homo sapiens
ctcccagccagagggca

SEQ ID NO: 9224 - DNA, 17 bp, Homo sapiens
tcccagccagagggcag

SEQ ID NO: 9225 - DNA, 17 bp, Homo sapiens
cccagccagagggcagc

SEQ ID NO: 9226 - DNA, 17 bp, Homo sapiens
ccagccagagggcagcc

SEQ ID NO: 9227 - DNA, 17 bp, Homo sapiens
cagccagagggcagcct

SEQ ID NO: 9228 - DNA, 17 bp, Homo sapiens
agccagagggcagcctg

SEQ ID NO: 9229 - DNA, 17 bp, Homo sapiens
gccagagggcagcctgc

SEQ ID NO: 9230 - DNA, 17 bp, Homo sapiens
ccagagggcagcctgca

SEQ ID NO: 9231 - DNA, 17 bp, Homo sapiens
cagagggcagcctgcag

SEQ ID NO: 9232 - DNA, 17 bp, Homo sapiens
agagggcagcctgcagt

SEQ ID NO: 9233 - DNA, 17 bp, Homo sapiens
gagggcagcctgcagtc

SEQ ID NO: 9234 - DNA, 17 bp, Homo sapiens
agggcagcctgcagtcc

SEQ ID NO: 9235 - DNA, 17 bp, Homo sapiens
gggcagcctgcagtcct

SEQ ID NO: 9236 - DNA, 17 bp, Homo sapiens
ggcagcctgcagtcctg

SEQ ID NO: 9237 - DNA, 17 bp, Homo sapiens
gcagcctgcagtcctgg

SEQ ID NO: 9238 - DNA, 17 bp, Homo sapiens
cagcctgcagtcctggt

SEQ ID NO: 9239 - DNA, 17 bp, Homo sapiens
agcctgcagtcctggtt

SEQ ID NO: 9240 - DNA, 17 bp, Homo sapiens
gcctgcagtcctggttg

SEQ ID NO: 9241 - DNA, 17 bp, Homo sapiens
cctgcagtcctggttga

SEQ ID NO: 9242 - DNA, 17 bp, Homo sapiens
ctgcagtcctggttgag

SEQ ID NO: 9243 - DNA, 17 bp, Homo sapiens
tgcagtcctggttgagc

SEQ ID NO: 9244 - DNA, 17 bp, Homo sapiens
gcagtcctggttgagct

SEQ ID NO: 9245 - DNA, 17 bp, Homo sapiens
cagtcctggttgagctg

SEQ ID NO: 9246 - DNA, 17 bp, Homo sapiens
agtcctggttgagctgt

SEQ ID NO: 9247 - DNA, 17 bp, Homo sapiens
gtcctggttgagctgta

SEQ ID NO: 9248 - DNA, 17 bp, Homo sapiens
tcctggttgagctgtac

SEQ ID NO: 9249 - DNA, 17 bp, Homo sapiens
cctggttgagctgtact

SEQ ID NO: 9250 - DNA, 17 bp, Homo sapiens
ctggttgagctgtactc

SEQ ID NO: 9251 - DNA, 17 bp, Homo sapiens
tggttgagctgtactct

SEQ ID NO: 9252 - DNA, 17 bp, Homo sapiens
ggttgagctgtactctg

SEQ ID NO: 9253 - DNA, 17 bp, Homo sapiens
gttgagctgtactctgt

SEQ ID NO: 9254 - DNA, 17 bp, Homo sapiens
ttgagctgtactctgtc

SEQ ID NO: 9255 - DNA, 17 bp, Homo sapiens
tgagctgtactctgtcc

SEQ ID NO: 9256 - DNA, 17 bp, Homo sapiens
gagctgtactctgtccc

SEQ ID NO: 9257 - DNA, 17 bp, Homo sapiens
agctgtactctgtccct

SEQ ID NO: 9258 - DNA, 17 bp, Homo sapiens
gctgtactctgtccctg

SEQ ID NO: 9259 - DNA, 17 bp, Homo sapiens
ctgtactctgtccctgg

SEQ ID NO: 9260 - DNA, 17 bp, Homo sapiens
tgtactctgtccctggc

SEQ ID NO: 9261 - DNA, 17 bp, Homo sapiens
gtactctgtccctggcc

SEQ ID NO: 9262 - DNA, 17 bp, Homo sapiens
tactctgtccctggcca

SEQ ID NO: 9263 - DNA, 17 bp, Homo sapiens
actctgtccctggccac

SEQ ID NO: 9264 - DNA, 17 bp, Homo sapiens
ctctgtccctggccaca

SEQ ID NO: 9265 - DNA, 17 bp, Homo sapiens
tctgtccctggccacag

SEQ ID NO: 9266 - DNA, 17 bp, Homo sapiens
ctgtccctggccacaga

SEQ ID NO: 9267 - DNA, 17 bp, Homo sapiens
tgtccctggccacagat

SEQ ID NO: 9268 - DNA, 17 bp, Homo sapiens
gtccctggccacagata

SEQ ID NO: 9269 - DNA, 17 bp, Homo sapiens
tccctggccacagatac

SEQ ID NO: 9270 - DNA, 17 bp, Homo sapiens
ccctggccacagatact

SEQ ID NO: 9271 - DNA, 17 bp, Homo sapiens
cctggccacagatacta

SEQ ID NO: 9272 - DNA, 17 bp, Homo sapiens
ctggccacagatactat

SEQ ID NO: 9273 - DNA, 17 bp, Homo sapiens
tggccacagatactatg

SEQ ID NO: 9274 - DNA, 17 bp, Homo sapiens
ggccacagatactatga

SEQ ID NO: 9275 - DNA, 17 bp, Homo sapiens
gccacagatactatgag

SEQ ID NO: 9276 - DNA, 17 bp, Homo sapiens
ccacagatactatgagg

SEQ ID NO: 9277 - DNA, 17 bp, Homo sapiens
cacagatactatgagga

SEQ ID NO: 9278 - DNA, 17 bp, Homo sapiens
acagatactatgaggac

SEQ ID NO: 9279 - DNA, 17 bp, Homo sapiens
cagatactatgaggact

SEQ ID NO: 9280 - DNA, 17 bp, Homo sapiens
agatactatgaggactc

SEQ ID NO: 9281 - DNA, 17 bp, Homo sapiens
gatactatgaggactcc

SEQ ID NO: 9282 - DNA, 17 bp, Homo sapiens
atactatgaggactcct

SEQ ID NO: 9283 - DNA, 17 bp, Homo sapiens
tactatgaggactcctt

SEQ ID NO: 9284 - DNA, 17 bp, Homo sapiens
actatgaggactccttc

SEQ ID NO: 9285 - DNA, 17 bp, Homo sapiens
ctatgaggactccttct

SEQ ID NO: 9286 - DNA, 17 bp, Homo sapiens
tatgaggactccttctc

SEQ ID NO: 9287 - DNA, 17 bp, Homo sapiens
atgaggactccttctcg

SEQ ID NO: 9288 - DNA, 17 bp, Homo sapiens
tgaggactccttctcga

SEQ ID NO: 9289 - DNA, 17 bp, Homo sapiens
gaggactccttctcgac

SEQ ID NO: 9290 - DNA, 17 bp, Homo sapiens
aggactccttctcgaca

SEQ ID NO: 9291 - DNA, 17 bp, Homo sapiens
ggactccttctcgacag

SEQ ID NO: 9292 - DNA, 17 bp, Homo sapiens
gactccttctcgacagt

SEQ ID NO: 9293 - DNA, 17 bp, Homo sapiens
actccttctcgacagtc

SEQ ID NO: 9294 - DNA, 17 bp, Homo sapiens
ctccttctcgacagtca

SEQ ID NO: 9295 - DNA, 17 bp, Homo sapiens
tccttctcgacagtcag

SEQ ID NO: 9296 - DNA, 17 bp, Homo sapiens
ccttctcgacagtcagc

SEQ ID NO: 9297 - DNA, 17 bp, Homo sapiens
cttctcgacagtcagcc

SEQ ID NO: 9298 - DNA, 17 bp, Homo sapiens
ttctcgacagtcagcca

SEQ ID NO: 9299 - DNA, 17 bp, Homo sapiens
tctcgacagtcagccac

SEQ ID NO: 9300 - DNA, 17 bp, Homo sapiens
ctcgacagtcagccacc

SEQ ID NO: 9301 - DNA, 17 bp, Homo sapiens
tcgacagtcagccacca

SEQ ID NO: 9302 - DNA, 17 bp, Homo sapiens
cgacagtcagccaccag

SEQ ID NO: 9303 - DNA, 17 bp, Homo sapiens
gacagtcagccaccagc

SEQ ID NO: 9304 - DNA, 17 bp, Homo sapiens
acagtcagccaccagca

SEQ ID NO: 9305 - DNA, 17 bp, Homo sapiens
cagtcagccaccagcag

SEQ ID NO: 9306 - DNA, 17 bp, Homo sapiens
agtcagccaccagcagc

SEQ ID NO: 9307 - DNA, 17 bp, Homo sapiens
gtcagccaccagcagcc

SEQ ID NO: 9308 - DNA, 17 bp, Homo sapiens
tcagccaccagcagccg

SEQ ID NO: 9309 - DNA, 17 bp, Homo sapiens
cagccaccagcagccgc

SEQ ID NO: 9310 - DNA, 17 bp, Homo sapiens
agccaccagcagccgca

SEQ ID NO: 9311 - DNA, 17 bp, Homo sapiens
gccaccagcagccgcat

SEQ ID NO: 9312 - DNA, 17 bp, Homo sapiens
ccaccagcagccgcatc

SEQ ID NO: 9313 - DNA, 17 bp, Homo sapiens
caccagcagccgcatcc

SEQ ID NO: 9314 - DNA, 17 bp, Homo sapiens
accagcagccgcatcct

SEQ ID NO: 9315 - DNA, 17 bp, Homo sapiens
ccagcagccgcatcctc

SEQ ID NO: 9316 - DNA, 17 bp, Homo sapiens
cagcagccgcatcctca

SEQ ID NO: 9317 - DNA, 17 bp, Homo sapiens
agcagccgcatcctcag

SEQ ID NO: 9318 - DNA, 17 bp, Homo sapiens
gcagccgcatcctcagc

SEQ ID NO: 9319 - DNA, 17 bp, Homo sapiens
cagccgcatcctcagcc

SEQ ID NO: 9320 - DNA, 17 bp, Homo sapiens
agccgcatcctcagccc

SEQ ID NO: 9321 - DNA, 17 bp, Homo sapiens
gccgcatcctcagcccc

SEQ ID NO: 9322 - DNA, 17 bp, Homo sapiens
ccgcatcctcagcccca

SEQ ID NO: 9323 - DNA, 17 bp, Homo sapiens
cgcatcctcagccccag

SEQ ID NO: 9324 - DNA, 17 bp, Homo sapiens
gcatcctcagccccagg

SEQ ID NO: 9325 - DNA, 17 bp, Homo sapiens
catcctcagccccagga

SEQ ID NO: 9326 - DNA, 17 bp, Homo sapiens
atcctcagccccaggat

SEQ ID NO: 9327 - DNA, 17 bp, Homo sapiens
tcctcagccccaggata

SEQ ID NO: 9328 - DNA, 17 bp, Homo sapiens
cctcagccccaggataa

SEQ ID NO: 9329 - DNA, 17 bp, Homo sapiens
ctcagccccaggataaa

SEQ ID NO: 9330 - DNA, 17 bp, Homo sapiens
tcagccccaggataaac

SEQ ID NO: 9331 - DNA, 17 bp, Homo sapiens
cagccccaggataaacg

SEQ ID NO: 9332 - DNA, 17 bp, Homo sapiens
agccccaggataaacga

SEQ ID NO: 9333 - DNA, 17 bp, Homo sapiens
gccccaggataaacgaa

SEQ ID NO: 9334 - DNA, 17 bp, Homo sapiens
ccccaggataaacgaag

SEQ ID NO: 9335 - DNA, 17 bp, Homo sapiens
cccaggataaacgaaga

SEQ ID NO: 9336 - DNA, 17 bp, Homo sapiens
ccaggataaacgaagag

SEQ ID NO: 9337 - DNA, 17 bp, Homo sapiens
caggataaacgaagagg

SEQ ID NO: 9338 - DNA, 17 bp, Homo sapiens
aggataaacgaagaggc

SEQ ID NO: 9339 - DNA, 17 bp, Homo sapiens
ggataaacgaagaggct

SEQ ID NO: 9340 - DNA, 17 bp, Homo sapiens
gataaacgaagaggctg

SEQ ID NO: 9341 - DNA, 17 bp, Homo sapiens
ataaacgaagaggctgg

SEQ ID NO: 9342 - DNA, 17 bp, Homo sapiens
taaacgaagaggctggg

SEQ ID NO: 9343 - DNA, 17 bp, Homo sapiens
aaacgaagaggctgggg

SEQ ID NO: 9344 - DNA, 17 bp, Homo sapiens
aacgaagaggctgggga

SEQ ID NO: 9345 - DNA, 17 bp, Homo sapiens
acgaagaggctggggac

SEQ ID NO: 9346 - DNA, 17 bp, Homo sapiens
cgaagaggctggggaca

SEQ ID NO: 9347 - DNA, 17 bp, Homo sapiens
gaagaggctggggacac

SEQ ID NO: 9348 - DNA, 17 bp, Homo sapiens
aagaggctggggacact

SEQ ID NO: 9349 - DNA, 17 bp, Homo sapiens
agaggctggggacactg

SEQ ID NO: 9350 - DNA, 17 bp, Homo sapiens
gaggctggggacactga

SEQ ID NO: 9351 - DNA, 17 bp, Homo sapiens
aggctggggacactgag

SEQ ID NO: 9352 - DNA, 17 bp, Homo sapiens
ggctggggacactgaga

SEQ ID NO: 9353 - DNA, 17 bp, Homo sapiens
gctggggacactgagag

SEQ ID NO: 9354 - DNA, 17 bp, Homo sapiens
ctggggacactgagagg

SEQ ID NO: 9355 - DNA, 17 bp, Homo sapiens
tggggacactgagagga

SEQ ID NO: 9356 - DNA, 17 bp, Homo sapiens
ggggacactgagaggac

SEQ ID NO: 9357 - DNA, 17 bp, Homo sapiens
gggacactgagaggacc

SEQ ID NO: 9358 - DNA, 17 bp, Homo sapiens
ggacactgagaggaccc

SEQ ID NO: 9359 - DNA, 17 bp, Homo sapiens
gacactgagaggaccca

SEQ ID NO: 9360 - DNA, 17 bp, Homo sapiens
acactgagaggacccag

SEQ ID NO: 9361 - DNA, 17 bp, Homo sapiens
cactgagaggacccagt

SEQ ID NO: 9362 - DNA, 17 bp, Homo sapiens
actgagaggacccagtc

SEQ ID NO: 9363 - DNA, 17 bp, Homo sapiens
ctgagaggacccagtcg

SEQ ID NO: 9364 - DNA, 17 bp, Homo sapiens
tgagaggacccagtcgg

SEQ ID NO: 9365 - DNA, 17 bp, Homo sapiens
gagaggacccagtcggc

SEQ ID NO: 9366 - DNA, 17 bp, Homo sapiens
agaggacccagtcggca

SEQ ID NO: 9367 - DNA, 17 bp, Homo sapiens
gaggacccagtcggcat

SEQ ID NO: 9368 - DNA, 17 bp, Homo sapiens
aggacccagtcggcatt

SEQ ID NO: 9369 - DNA, 17 bp, Homo sapiens
ggacccagtcggcattg

SEQ ID NO: 9370 - DNA, 17 bp, Homo sapiens
gacccagtcggcattgg

SEQ ID NO: 9371 - DNA, 17 bp, Homo sapiens
acccagtcggcattggc

SEQ ID NO: 9372 - DNA, 17 bp, Homo sapiens
cccagtcggcattggca

SEQ ID NO: 9373 - DNA, 17 bp, Homo sapiens
ccagtcggcattggcac

SEQ ID NO: 9374 - DNA, 17 bp, Homo sapiens
cagtcggcattggcact

SEQ ID NO: 9375 - DNA, 17 bp, Homo sapiens
agtcggcattggcactg

SEQ ID NO: 9376 - DNA, 17 bp, Homo sapiens
gtcggcattggcactga

SEQ ID NO: 9377 - DNA, 17 bp, Homo sapiens
tcggcattggcactgag

SEQ ID NO: 9378 - DNA, 17 bp, Homo sapiens
cggcattggcactgagc

SEQ ID NO: 9379 - DNA, 17 bp, Homo sapiens
ggcattggcactgagca

SEQ ID NO: 9380 - DNA, 17 bp, Homo sapiens
gcattggcactgagcag

SEQ ID NO: 9381 - DNA, 17 bp, Homo sapiens
cattggcactgagcaga

SEQ ID NO: 9382 - DNA, 17 bp, Homo sapiens
attggcactgagcagag

SEQ ID NO: 9383 - DNA, 17 bp, Homo sapiens
ttggcactgagcagagc

SEQ ID NO: 9384 - DNA, 17 bp, Homo sapiens
tggcactgagcagagcc

SEQ ID NO: 9385 - DNA, 17 bp, Homo sapiens
ggcactgagcagagccc

SEQ ID NO: 9386 - DNA, 17 bp, Homo sapiens
gcactgagcagagcccg

SEQ ID NO: 9387 - DNA, 17 bp, Homo sapiens
cactgagcagagcccgg

SEQ ID NO: 9388 - DNA, 17 bp, Homo sapiens
actgagcagagcccggt

SEQ ID NO: 9389 - DNA, 17 bp, Homo sapiens
ctgagcagagcccggtc

SEQ ID NO: 9390 - DNA, 17 bp, Homo sapiens
tgagcagagcccggtcc

SEQ ID NO: 9391 - DNA, 17 bp, Homo sapiens
gagcagagcccggtcca

SEQ ID NO: 9392 - DNA, 17 bp, Homo sapiens
agcagagcccggtccac

SEQ ID NO: 9393 - DNA, 17 bp, Homo sapiens
gcagagcccggtccacc

SEQ ID NO: 9394 - DNA, 17 bp, Homo sapiens
cagagcccggtccacca

SEQ ID NO: 9395 - DNA, 17 bp, Homo sapiens
agagcccggtccaccaa

SEQ ID NO: 9396 - DNA, 17 bp, Homo sapiens
gagcccggtccaccaat

SEQ ID NO: 9397 - DNA, 17 bp, Homo sapiens
agcccggtccaccaatg

SEQ ID NO: 9398 - DNA, 17 bp, Homo sapiens
gcccggtccaccaatgt

SEQ ID NO: 9399 - DNA, 17 bp, Homo sapiens
cccggtccaccaatgtc

SEQ ID NO: 9400 - DNA, 17 bp, Homo sapiens
ccggtccaccaatgtcc

SEQ ID NO: 9401 - DNA, 17 bp, Homo sapiens
cggtccaccaatgtcca

SEQ ID NO: 9402 - DNA, 17 bp, Homo sapiens
ggtccaccaatgtccac

SEQ ID NO: 9403 - DNA, 17 bp, Homo sapiens
gtccaccaatgtccaca

SEQ ID NO: 9404 - DNA, 17 bp, Homo sapiens
tccaccaatgtccacag

SEQ ID NO: 9405 - DNA, 17 bp, Homo sapiens
ccaccaatgtccacagc

SEQ ID NO: 9406 - DNA, 17 bp, Homo sapiens
caccaatgtccacagca

SEQ ID NO: 9407 - DNA, 17 bp, Homo sapiens
accaatgtccacagcaa

SEQ ID NO: 9408 - DNA, 17 bp, Homo sapiens
ccaatgtccacagcaag

SEQ ID NO: 9409 - DNA, 17 bp, Homo sapiens
caatgtccacagcaaga

SEQ ID NO: 9410 - DNA, 17 bp, Homo sapiens
aatgtccacagcaagac

SEQ ID NO: 9411 - DNA, 17 bp, Homo sapiens
atgtccacagcaagacc

SEQ ID NO: 9412 - DNA, 17 bp, Homo sapiens
tgtccacagcaagacct

SEQ ID NO: 9413 - DNA, 17 bp, Homo sapiens
gtccacagcaagacctc

SEQ ID NO: 9414 - DNA, 17 bp, Homo sapiens
tccacagcaagacctca

SEQ ID NO: 9415 - DNA, 17 bp, Homo sapiens
ccacagcaagacctcag

SEQ ID NO: 9416 - DNA, 17 bp, Homo sapiens
cacagcaagacctcagg

SEQ ID NO: 9417 - DNA, 17 bp, Homo sapiens
acagcaagacctcagga

SEQ ID NO: 9418 - DNA, 17 bp, Homo sapiens
cagcaagacctcaggag

SEQ ID NO: 9419 - DNA, 17 bp, Homo sapiens
agcaagacctcaggaga

SEQ ID NO: 9420 - DNA, 17 bp, Homo sapiens
gcaagacctcaggagac

SEQ ID NO: 9421 - DNA, 17 bp, Homo sapiens
caagacctcaggagaca

SEQ ID NO: 9422 - DNA, 17 bp, Homo sapiens
aagacctcaggagacaa

SEQ ID NO: 9423 - DNA, 17 bp, Homo sapiens
agacctcaggagacaag

SEQ ID NO: 9424 - DNA, 17 bp, Homo sapiens
gacctcaggagacaagc

SEQ ID NO: 9425 - DNA, 17 bp, Homo sapiens
acctcaggagacaagcc

SEQ ID NO: 9426 - DNA, 17 bp, Homo sapiens
cctcaggagacaagcct

SEQ ID NO: 9427 - DNA, 17 bp, Homo sapiens
ctcaggagacaagcctg

SEQ ID NO: 9428 - DNA, 17 bp, Homo sapiens
tcaggagacaagcctgt

SEQ ID NO: 9429 - DNA, 17 bp, Homo sapiens
caggagacaagcctgtt

SEQ ID NO: 9430 - DNA, 17 bp, Homo sapiens
aggagacaagcctgttt

SEQ ID NO: 9431 - DNA, 17 bp, Homo sapiens
ggagacaagcctgtttc

SEQ ID NO: 9432 - DNA, 17 bp, Homo sapiens
gagacaagcctgtttct

SEQ ID NO: 9433 - DNA, 17 bp, Homo sapiens
agacaagcctgtttctc

SEQ ID NO: 9434 - DNA, 17 bp, Homo sapiens
gacaagcctgtttctcc

SEQ ID NO: 9435 - DNA, 17 bp, Homo sapiens
acaagcctgtttctccc

SEQ ID NO: 9436 - DNA, 17 bp, Homo sapiens
caagcctgtttctcccc

SEQ ID NO: 9437 - DNA, 17 bp, Homo sapiens
aagcctgtttctcccca

SEQ ID NO: 9438 - DNA, 17 bp, Homo sapiens
agcctgtttctccccac

SEQ ID NO: 9439 - DNA, 17 bp, Homo sapiens
gcctgtttctccccact

SEQ ID NO: 9440 - DNA, 17 bp, Homo sapiens
cctgtttctccccactt

SEQ ID NO: 9441 - DNA, 17 bp, Homo sapiens
ctgtttctccccacttt

SEQ ID NO: 9442 - DNA, 17 bp, Homo sapiens
tgtttctccccactttg

SEQ ID NO: 9443 - DNA, 17 bp, Homo sapiens
gtttctccccactttgt

SEQ ID NO: 9444 - DNA, 17 bp, Homo sapiens
tttctccccactttgtc

SEQ ID NO: 9445 - DNA, 17 bp, Homo sapiens
ttctccccactttgtcc

SEQ ID NO: 9446 - DNA, 17 bp, Homo sapiens
tctccccactttgtccg

SEQ ID NO: 9447 - DNA, 17 bp, Homo sapiens
ctccccactttgtccgc

SEQ ID NO: 9448 - DNA, 17 bp, Homo sapiens
tccccactttgtccgcc

SEQ ID NO: 9449 - DNA, 17 bp, Homo sapiens
ccccactttgtccgccg

SEQ ID NO: 9450 - DNA, 17 bp, Homo sapiens
cccactttgtccgccgg

SEQ ID NO: 9451 - DNA, 17 bp, Homo sapiens
ccactttgtccgccggc

SEQ ID NO: 9452 - DNA, 17 bp, Homo sapiens
cactttgtccgccggca

SEQ ID NO: 9453 - DNA, 17 bp, Homo sapiens
actttgtccgccggcaa

SEQ ID NO: 9454 - DNA, 17 bp, Homo sapiens
ctttgtccgccggcaaa

SEQ ID NO: 9455 - DNA, 17 bp, Homo sapiens
tttgtccgccggcaaaa

SEQ ID NO: 9456 - DNA, 17 bp, Homo sapiens
ttgtccgccggcaaaag

SEQ ID NO: 9457 - DNA, 17 bp, Homo sapiens
tgtccgccggcaaaagt

SEQ ID NO: 9458 - DNA, 17 bp, Homo sapiens
gtccgccggcaaaagta

SEQ ID NO: 9459 - DNA, 17 bp, Homo sapiens
tccgccggcaaaagtac

SEQ ID NO: 9460 - DNA, 17 bp, Homo sapiens
ccgccggcaaaagtact

SEQ ID NO: 9461 - DNA, 17 bp, Homo sapiens
cgccggcaaaagtactg

SEQ ID NO: 9462 - DNA, 17 bp, Homo sapiens
gccggcaaaagtactgt

SEQ ID NO: 9463 - DNA, 17 bp, Homo sapiens
ccggcaaaagtactgtc

SEQ ID NO: 9464 - DNA, 17 bp, Homo sapiens
cggcaaaagtactgtca

SEQ ID NO: 9465 - DNA, 17 bp, Homo sapiens
ggcaaaagtactgtcat

SEQ ID NO: 9466 - DNA, 17 bp, Homo sapiens
gcaaaagtactgtcatt

SEQ ID NO: 9467 - DNA, 17 bp, Homo sapiens
caaaagtactgtcattt

SEQ ID NO: 9468 - DNA, 17 bp, Homo sapiens
aaaagtactgtcatttt

SEQ ID NO: 9469 - DNA, 17 bp, Homo sapiens
aaagtactgtcattttg

SEQ ID NO: 9470 - DNA, 17 bp, Homo sapiens
aagtactgtcattttgg

SEQ ID NO: 9471 - DNA, 17 bp, Homo sapiens
agtactgtcattttggg

SEQ ID NO: 9472 - DNA, 17 bp, Homo sapiens
gtactgtcattttgggg

SEQ ID NO: 9473 - DNA, 17 bp, Homo sapiens
tactgtcattttgggga

SEQ ID NO: 9474 - DNA, 17 bp, Homo sapiens
actgtcattttggggac

SEQ ID NO: 9475 - DNA, 17 bp, Homo sapiens
ctgtcattttggggacg

SEQ ID NO: 9476 - DNA, 17 bp, Homo sapiens
tgtcattttggggacgg

SEQ ID NO: 9477 - DNA, 17 bp, Homo sapiens
gtcattttggggacggc

SEQ ID NO: 9478 - DNA, 17 bp, Homo sapiens
tcattttggggacggcg

SEQ ID NO: 9479 - DNA, 17 bp, Homo sapiens
cattttggggacggcga

SEQ ID NO: 9480 - DNA, 17 bp, Homo sapiens
attttggggacggcgaa

SEQ ID NO: 9481 - DNA, 17 bp, Homo sapiens
ttttggggacggcgaag

SEQ ID NO: 9482 - DNA, 17 bp, Homo sapiens
tttggggacggcgaagt

SEQ ID NO: 9483 - DNA, 17 bp, Homo sapiens
ttggggacggcgaagtg

SEQ ID NO: 9484 - DNA, 17 bp, Homo sapiens
tggggacggcgaagtgc

SEQ ID NO: 9485 - DNA, 17 bp, Homo sapiens
ggggacggcgaagtgct

SEQ ID NO: 9486 - DNA, 17 bp, Homo sapiens
gggacggcgaagtgctt

SEQ ID NO: 9487 - DNA, 17 bp, Homo sapiens
ggacggcgaagtgcttg

SEQ ID NO: 9488 - DNA, 17 bp, Homo sapiens
gacggcgaagtgcttgc

SEQ ID NO: 9489 - DNA, 17 bp, Homo sapiens
acggcgaagtgcttgcc

SEQ ID NO: 9490 - DNA, 17 bp, Homo sapiens
cggcgaagtgcttgccg

SEQ ID NO: 9491 - DNA, 17 bp, Homo sapiens
ggcgaagtgcttgccgt

SEQ ID NO: 9492 - DNA, 17 bp, Homo sapiens
gcgaagtgcttgccgtc

SEQ ID NO: 9493 - DNA, 17 bp, Homo sapiens
cgaagtgcttgccgtcc

SEQ ID NO: 9494 - DNA, 17 bp, Homo sapiens
gaagtgcttgccgtcca

SEQ ID NO: 9495 - DNA, 17 bp, Homo sapiens
aagtgcttgccgtccag

SEQ ID NO: 9496 - DNA, 17 bp, Homo sapiens
agtgcttgccgtccaga

SEQ ID NO: 9497 - DNA, 17 bp, Homo sapiens
gtgcttgccgtccagag

SEQ ID NO: 9498 - DNA, 17 bp, Homo sapiens
tgcttgccgtccagaga

SEQ ID NO: 9499 - DNA, 17 bp, Homo sapiens
gcttgccgtccagagaa

SEQ ID NO: 9500 - DNA, 17 bp, Homo sapiens
cttgccgtccagagaaa

SEQ ID NO: 9501 - DNA, 17 bp, Homo sapiens
ttgccgtccagagaaag

SEQ ID NO: 9502 - DNA, 17 bp, Homo sapiens
tgccgtccagagaaagt

SEQ ID NO: 9503 - DNA, 17 bp, Homo sapiens
gccgtccagagaaagtc

SEQ ID NO: 9504 - DNA, 17 bp, Homo sapiens
ccgtccagagaaagtcc

SEQ ID NO: 9505 - DNA, 17 bp, Homo sapiens
cgtccagagaaagtcca

SEQ ID NO: 9506 - DNA, 17 bp, Homo sapiens
gtccagagaaagtccac

SEQ ID NO: 9507 - DNA, 17 bp, Homo sapiens
tccagagaaagtccaca

SEQ ID NO: 9508 - DNA, 17 bp, Homo sapiens
ccagagaaagtccacag

SEQ ID NO: 9509 - DNA, 17 bp, Homo sapiens
cagagaaagtccacaga

SEQ ID NO: 9510 - DNA, 17 bp, Homo sapiens
agagaaagtccacagag

SEQ ID NO: 9511 - DNA, 17 bp, Homo sapiens
gagaaagtccacagaga

SEQ ID NO: 9512 - DNA, 17 bp, Homo sapiens
agaaagtccacagagag

SEQ ID NO: 9513 - DNA, 17 bp, Homo sapiens
gaaagtccacagagaga

SEQ ID NO: 9514 - DNA, 17 bp, Homo sapiens
aaagtccacagagagat

SEQ ID NO: 9515 - DNA, 17 bp, Homo sapiens
aagtccacagagagatt

SEQ ID NO: 9516 - DNA, 17 bp, Homo sapiens
agtccacagagagatta

SEQ ID NO: 9517 - DNA, 17 bp, Homo sapiens
gtccacagagagattag

SEQ ID NO: 9518 - DNA, 17 bp, Homo sapiens
tccacagagagattaga

SEQ ID NO: 9519 - DNA, 17 bp, Homo sapiens
ccacagagagattagaa

SEQ ID NO: 9520 - DNA, 17 bp, Homo sapiens
cacagagagattagaac

SEQ ID NO: 9521 - DNA, 17 bp, Homo sapiens
acagagagattagaacc

SEQ ID NO: 9522 - DNA, 17 bp, Homo sapiens
cagagagattagaacct

SEQ ID NO: 9523 - DNA, 17 bp, Homo sapiens
agagagattagaacctg

SEQ ID NO: 9524 - DNA, 17 bp, Homo sapiens
gagagattagaacctgc

SEQ ID NO: 9525 - DNA, 17 bp, Homo sapiens
agagattagaacctgct

SEQ ID NO: 9526 - DNA, 17 bp, Homo sapiens
gagattagaacctgctt

SEQ ID NO: 9527 - DNA, 17 bp, Homo sapiens
agattagaacctgcttc

SEQ ID NO: 9528 - DNA, 17 bp, Homo sapiens
gattagaacctgcttcc

SEQ ID NO: 9529 - DNA, 17 bp, Homo sapiens
attagaacctgcttcct

SEQ ID NO: 9530 - DNA, 17 bp, Homo sapiens
ttagaacctgcttcctc

SEQ ID NO: 9531 - DNA, 17 bp, Homo sapiens
tagaacctgcttcctct

SEQ ID NO: 9532 - DNA, 17 bp, Homo sapiens
agaacctgcttcctctc

SEQ ID NO: 9533 - DNA, 17 bp, Homo sapiens
gaacctgcttcctctcc

SEQ ID NO: 9534 - DNA, 17 bp, Homo sapiens
aacctgcttcctctccc

SEQ ID NO: 9535 - DNA, 17 bp, Homo sapiens
acctgcttcctctcccc

SEQ ID NO: 9536 - DNA, 17 bp, Homo sapiens
cctgcttcctctcccct

SEQ ID NO: 9537 - DNA, 17 bp, Homo sapiens
ctgcttcctctcccctg

SEQ ID NO: 9538 - DNA, 17 bp, Homo sapiens
tgcttcctctcccctgg

SEQ ID NO: 9539 - DNA, 17 bp, Homo sapiens
gcttcctctcccctggc

SEQ ID NO: 9540 - DNA, 17 bp, Homo sapiens
cttcctctcccctggct

SEQ ID NO: 9541 - DNA, 17 bp, Homo sapiens
ttcctctcccctggctt

SEQ ID NO: 9542 - DNA, 17 bp, Homo sapiens
tcctctcccctggcttc

SEQ ID NO: 9543 - DNA, 17 bp, Homo sapiens
cctctcccctggcttct

SEQ ID NO: 9544 - DNA, 17 bp, Homo sapiens
ctctcccctggcttctc

SEQ ID NO: 9545 - DNA, 17 bp, Homo sapiens
tctcccctggcttctcg

SEQ ID NO: 9546 - DNA, 17 bp, Homo sapiens
ctcccctggcttctcgg

SEQ ID NO: 9547 - DNA, 17 bp, Homo sapiens
tcccctggcttctcgga

SEQ ID NO: 9548 - DNA, 17 bp, Homo sapiens
cccctggcttctcggag

SEQ ID NO: 9549 - DNA, 17 bp, Homo sapiens
ccctggcttctcggagt

SEQ ID NO: 9550 - DNA, 17 bp, Homo sapiens
cctggcttctcggagta

SEQ ID NO: 9551 - DNA, 17 bp, Homo sapiens
ctggcttctcggagtac

SEQ ID NO: 9552 - DNA, 17 bp, Homo sapiens
tggcttctcggagtaca

SEQ ID NO: 9553 - DNA, 17 bp, Homo sapiens
ggcttctcggagtacaa

SEQ ID NO: 9554 - DNA, 17 bp, Homo sapiens
gcttctcggagtacaaa

SEQ ID NO: 9555 - DNA, 17 bp, Homo sapiens
cttctcggagtacaaat

SEQ ID NO: 9556 - DNA, 17 bp, Homo sapiens
ttctcggagtacaaata

SEQ ID NO: 9557 - DNA, 17 bp, Homo sapiens
tctcggagtacaaatac

SEQ ID NO: 9558 - DNA, 17 bp, Homo sapiens
ctcggagtacaaataca

SEQ ID NO: 9559 - DNA, 17 bp, Homo sapiens
tcggagtacaaatacat

SEQ ID NO: 9560 - DNA, 17 bp, Homo sapiens
cggagtacaaatacatc

SEQ ID NO: 9561 - DNA, 17 bp, Homo sapiens
ggagtacaaatacatcc

SEQ ID NO: 9562 - DNA, 17 bp, Homo sapiens
gagtacaaatacatccc

SEQ ID NO: 9563 - DNA, 17 bp, Homo sapiens
agtacaaatacatcccc

SEQ ID NO: 9564 - DNA, 17 bp, Homo sapiens
gtacaaatacatccccg

SEQ ID NO: 9565 - DNA, 17 bp, Homo sapiens
tacaaatacatccccgc

SEQ ID NO: 9566 - DNA, 17 bp, Homo sapiens
acaaatacatccccgct

SEQ ID NO: 9567 - DNA, 17 bp, Homo sapiens
caaatacatccccgctg

SEQ ID NO: 9568 - DNA, 17 bp, Homo sapiens
aaatacatccccgctgt

SEQ ID NO: 9569 - DNA, 17 bp, Homo sapiens
aatacatccccgctgtc

SEQ ID NO: 9570 - DNA, 17 bp, Homo sapiens
atacatccccgctgtcg

SEQ ID NO: 9571 - DNA, 17 bp, Homo sapiens
tacatccccgctgtcga

SEQ ID NO: 9572 - DNA, 17 bp, Homo sapiens
acatccccgctgtcgag

SEQ ID NO: 9573 - DNA, 17 bp, Homo sapiens
catccccgctgtcgagg

SEQ ID NO: 9574 - DNA, 17 bp, Homo sapiens
atccccgctgtcgaggg

SEQ ID NO: 9575 - DNA, 17 bp, Homo sapiens
tccccgctgtcgaggga

SEQ ID NO: 9576 - DNA, 17 bp, Homo sapiens
ccccgctgtcgagggaa

SEQ ID NO: 9577 - DNA, 17 bp, Homo sapiens
cccgctgtcgagggaaa

SEQ ID NO: 9578 - DNA, 17 bp, Homo sapiens
ccgctgtcgagggaaaa

SEQ ID NO: 9579 - DNA, 17 bp, Homo sapiens
cgctgtcgagggaaaag

SEQ ID NO: 9580 - DNA, 17 bp, Homo sapiens
gctgtcgagggaaaagc

SEQ ID NO: 9581 - DNA, 17 bp, Homo sapiens
ctgtcgagggaaaagct

SEQ ID NO: 9582 - DNA, 17 bp, Homo sapiens
tgtcgagggaaaagctg

SEQ ID NO: 9583 - DNA, 17 bp, Homo sapiens
gtcgagggaaaagctgc

SEQ ID NO: 9584 - DNA, 17 bp, Homo sapiens
tcgagggaaaagctgcc

SEQ ID NO: 9585 - DNA, 17 bp, Homo sapiens
cgagggaaaagctgccc

SEQ ID NO: 9586 - DNA, 17 bp, Homo sapiens
gagggaaaagctgccca

SEQ ID NO: 9587 - DNA, 17 bp, Homo sapiens
agggaaaagctgcccag

SEQ ID NO: 9588 - DNA, 17 bp, Homo sapiens
gggaaaagctgcccagt

SEQ ID NO: 9589 - DNA, 17 bp, Homo sapiens
ggaaaagctgcccagtc

SEQ ID NO: 9590 - DNA, 17 bp, Homo sapiens
gaaaagctgcccagtcc

SEQ ID NO: 9591 - DNA, 17 bp, Homo sapiens
aaaagctgcccagtcct

SEQ ID NO: 9592 - DNA, 17 bp, Homo sapiens
aaagctgcccagtcctt

SEQ ID NO: 9593 - DNA, 17 bp, Homo sapiens
aagctgcccagtccttc

SEQ ID NO: 9594 - DNA, 17 bp, Homo sapiens
agctgcccagtccttca

SEQ ID NO: 9595 - DNA, 17 bp, Homo sapiens
gctgcccagtccttcag

SEQ ID NO: 9596 - DNA, 17 bp, Homo sapiens
ctgcccagtccttcagc

SEQ ID NO: 9597 - DNA, 17 bp, Homo sapiens
tgcccagtccttcagcg

SEQ ID NO: 9598 - DNA, 17 bp, Homo sapiens
gcccagtccttcagcgg

SEQ ID NO: 9599 - DNA, 17 bp, Homo sapiens
cccagtccttcagcggc

SEQ ID NO: 9600 - DNA, 17 bp, Homo sapiens
ccagtccttcagcggcc

SEQ ID NO: 9601 - DNA, 17 bp, Homo sapiens
cagtccttcagcggccc

SEQ ID NO: 9602 - DNA, 17 bp, Homo sapiens
agtccttcagcggccct

SEQ ID NO: 9603 - DNA, 17 bp, Homo sapiens
gtccttcagcggccctc

SEQ ID NO: 9604 - DNA, 17 bp, Homo sapiens
tccttcagcggccctct

SEQ ID NO: 9605 - DNA, 17 bp, Homo sapiens
ccttcagcggccctctc

SEQ ID NO: 9606 - DNA, 17 bp, Homo sapiens
cttcagcggccctctcg

SEQ ID NO: 9607 - DNA, 17 bp, Homo sapiens
ttcagcggccctctcgg

SEQ ID NO: 9608 - DNA, 17 bp, Homo sapiens
tcagcggccctctcgga

SEQ ID NO: 9609 - DNA, 17 bp, Homo sapiens
cagcggccctctcggag

SEQ ID NO: 9610 - DNA, 17 bp, Homo sapiens
agcggccctctcggagt

SEQ ID NO: 9611 - DNA, 17 bp, Homo sapiens
gcggccctctcggagtt

SEQ ID NO: 9612 - DNA, 17 bp, Homo sapiens
cggccctctcggagttc

SEQ ID NO: 9613 - DNA, 17 bp, Homo sapiens
ggccctctcggagttcg

SEQ ID NO: 9614 - DNA, 17 bp, Homo sapiens
gccctctcggagttcgt

SEQ ID NO: 9615 - DNA, 17 bp, Homo sapiens
ccctctcggagttcgtg

SEQ ID NO: 9616 - DNA, 17 bp, Homo sapiens
cctctcggagttcgtgg

SEQ ID NO: 9617 - DNA, 17 bp, Homo sapiens
ctctcggagttcgtgga

SEQ ID NO: 9618 - DNA, 17 bp, Homo sapiens
tctcggagttcgtggaa

SEQ ID NO: 9619 - DNA, 17 bp, Homo sapiens
ctcggagttcgtggaag

SEQ ID NO: 9620 - DNA, 17 bp, Homo sapiens
tcggagttcgtggaagg

SEQ ID NO: 9621 - DNA, 17 bp, Homo sapiens
cggagttcgtggaaggg

SEQ ID NO: 9622 - DNA, 17 bp, Homo sapiens
ggagttcgtggaagggc

SEQ ID NO: 9623 - DNA, 17 bp, Homo sapiens
gagttcgtggaagggct

SEQ ID NO: 9624 - DNA, 17 bp, Homo sapiens
agttcgtggaagggctc

SEQ ID NO: 9625 - DNA, 17 bp, Homo sapiens
gttcgtggaagggctcc

SEQ ID NO: 9626 - DNA, 17 bp, Homo sapiens
ttcgtggaagggctccg

SEQ ID NO: 9627 - DNA, 17 bp, Homo sapiens
tcgtggaagggctccgg

SEQ ID NO: 9628 - DNA, 17 bp, Homo sapiens
cgtggaagggctccgga

SEQ ID NO: 9629 - DNA, 17 bp, Homo sapiens
gtggaagggctccggag

SEQ ID NO: 9630 - DNA, 17 bp, Homo sapiens
tggaagggctccggagg

SEQ ID NO: 9631 - DNA, 17 bp, Homo sapiens
ggaagggctccggagga

SEQ ID NO: 9632 - DNA, 17 bp, Homo sapiens
gaagggctccggaggaa

SEQ ID NO: 9633 - DNA, 17 bp, Homo sapiens
aagggctccggaggaag

SEQ ID NO: 9634 - DNA, 17 bp, Homo sapiens
agggctccggaggaaga

SEQ ID NO: 9635 - DNA, 17 bp, Homo sapiens
gggctccggaggaagag

SEQ ID NO: 9636 - DNA, 17 bp, Homo sapiens
ggctccggaggaagaga

SEQ ID NO: 9637 - DNA, 17 bp, Homo sapiens
gctccggaggaagagag

SEQ ID NO: 9638 - DNA, 17 bp, Homo sapiens
ctccggaggaagagagc

SEQ ID NO: 9639 - DNA, 17 bp, Homo sapiens
tccggaggaagagagcc

SEQ ID NO: 9640 - DNA, 17 bp, Homo sapiens
ccggaggaagagagccc

SEQ ID NO: 9641 - DNA, 17 bp, Homo sapiens
cggaggaagagagccca

SEQ ID NO: 9642 - DNA, 17 bp, Homo sapiens
ggaggaagagagcccag

SEQ ID NO: 9643 - DNA, 17 bp, Homo sapiens
gaggaagagagcccaga

SEQ ID NO: 9644 - DNA, 17 bp, Homo sapiens
aggaagagagcccagag

SEQ ID NO: 9645 - DNA, 17 bp, Homo sapiens
ggaagagagcccagaga

SEQ ID NO: 9646 - DNA, 17 bp, Homo sapiens
gaagagagcccagagag

SEQ ID NO: 9647 - DNA, 17 bp, Homo sapiens
aagagagcccagagagg

SEQ ID NO: 9648 - DNA, 17 bp, Homo sapiens
agagagcccagagaggc

SEQ ID NO: 9649 - DNA, 17 bp, Homo sapiens
gagagcccagagaggcc

SEQ ID NO: 9650 - DNA, 17 bp, Homo sapiens
agagcccagagaggcca

SEQ ID NO: 9651 - DNA, 17 bp, Homo sapiens
gagcccagagaggccag

SEQ ID NO: 9652 - DNA, 17 bp, Homo sapiens
agcccagagaggccagg

SEQ ID NO: 9653 - DNA, 17 bp, Homo sapiens
gcccagagaggccaggg

SEQ ID NO: 9654 - DNA, 17 bp, Homo sapiens
cccagagaggccagggg

SEQ ID NO: 9655 - DNA, 17 bp, Homo sapiens
ccagagaggccaggggt

SEQ ID NO: 9656 - DNA, 17 bp, Homo sapiens
cagagaggccaggggtc

SEQ ID NO: 9657 - DNA, 17 bp, Homo sapiens
agagaggccaggggtcc

SEQ ID NO: 9658 - DNA, 17 bp, Homo sapiens
gagaggccaggggtcca

SEQ ID NO: 9659 - DNA, 17 bp, Homo sapiens
agaggccaggggtccac

SEQ ID NO: 9660 - DNA, 17 bp, Homo sapiens
gaggccaggggtccacg

SEQ ID NO: 9661 - DNA, 17 bp, Homo sapiens
aggccaggggtccacgc

SEQ ID NO: 9662 - DNA, 17 bp, Homo sapiens
ggccaggggtccacgct

SEQ ID NO: 9663 - DNA, 17 bp, Homo sapiens
gccaggggtccacgctg

SEQ ID NO: 9664 - DNA, 17 bp, Homo sapiens
ccaggggtccacgctgg

SEQ ID NO: 9665 - DNA, 17 bp, Homo sapiens
caggggtccacgctggg

SEQ ID NO: 9666 - DNA, 17 bp, Homo sapiens
aggggtccacgctgggc

SEQ ID NO: 9667 - DNA, 17 bp, Homo sapiens
ggggtccacgctgggcc

SEQ ID NO: 9668 - DNA, 17 bp, Homo sapiens
gggtccacgctgggcct

SEQ ID NO: 9669 - DNA, 17 bp, Homo sapiens
ggtccacgctgggccta

SEQ ID NO: 9670 - DNA, 17 bp, Homo sapiens
gtccacgctgggcctag

SEQ ID NO: 9671 - DNA, 17 bp, Homo sapiens
tccacgctgggcctaga

SEQ ID NO: 9672 - DNA, 17 bp, Homo sapiens
ccacgctgggcctagag

SEQ ID NO: 9673 - DNA, 17 bp, Homo sapiens
cacgctgggcctagagg

SEQ ID NO: 9674 - DNA, 17 bp, Homo sapiens
acgctgggcctagagga

SEQ ID NO: 9675 - DNA, 17 bp, Homo sapiens
cgctgggcctagaggac

SEQ ID NO: 9676 - DNA, 17 bp, Homo sapiens
gctgggcctagaggact

SEQ ID NO: 9677 - DNA, 17 bp, Homo sapiens
ctgggcctagaggactg

SEQ ID NO: 9678 - DNA, 17 bp, Homo sapiens
tgggcctagaggactgg

SEQ ID NO: 9679 - DNA, 17 bp, Homo sapiens
gggcctagaggactggc

SEQ ID NO: 9680 - DNA, 17 bp, Homo sapiens
ggcctagaggactggcc

SEQ ID NO: 9681 - DNA, 17 bp, Homo sapiens
gcctagaggactggccc

SEQ ID NO: 9682 - DNA, 17 bp, Homo sapiens
cctagaggactggccca

SEQ ID NO: 9683 - DNA, 17 bp, Homo sapiens
ctagaggactggcccac

SEQ ID NO: 9684 - DNA, 17 bp, Homo sapiens
tagaggactggcccact

SEQ ID NO: 9685 - DNA, 17 bp, Homo sapiens
agaggactggcccactc

SEQ ID NO: 9686 - DNA, 17 bp, Homo sapiens
gaggactggcccactct

SEQ ID NO: 9687 - DNA, 17 bp, Homo sapiens
aggactggcccactctc

SEQ ID NO: 9688 - DNA, 17 bp, Homo sapiens
ggactggcccactctcc

SEQ ID NO: 9689 - DNA, 17 bp, Homo sapiens
gactggcccactctccc

SEQ ID NO: 9690 - DNA, 17 bp, Homo sapiens
actggcccactctcccc

SEQ ID NO: 9691 - DNA, 17 bp, Homo sapiens
ctggcccactctcccca

SEQ ID NO: 9692 - DNA, 17 bp, Homo sapiens
tggcccactctccccat

SEQ ID NO: 9693 - DNA, 17 bp, Homo sapiens
ggcccactctccccatt

SEQ ID NO: 9694 - DNA, 17 bp, Homo sapiens
gcccactctccccattt

SEQ ID NO: 9695 - DNA, 17 bp, Homo sapiens
cccactctccccattta

SEQ ID NO: 9696 - DNA, 17 bp, Homo sapiens
ccactctccccatttac

SEQ ID NO: 9697 - DNA, 17 bp, Homo sapiens
cactctccccatttacc

SEQ ID NO: 9698 - DNA, 17 bp, Homo sapiens
actctccccatttacca

SEQ ID NO: 9699 - DNA, 17 bp, Homo sapiens
ctctccccatttaccag

SEQ ID NO: 9700 - DNA, 17 bp, Homo sapiens
tctccccatttaccaga

SEQ ID NO: 9701 - DNA, 17 bp, Homo sapiens
ctccccatttaccagac

SEQ ID NO: 9702 - DNA, 17 bp, Homo sapiens
tccccatttaccagacg

SEQ ID NO: 9703 - DNA, 17 bp, Homo sapiens
ccccatttaccagacga

SEQ ID NO: 9704 - DNA, 17 bp, Homo sapiens
cccatttaccagacgac

SEQ ID NO: 9705 - DNA, 17 bp, Homo sapiens
ccatttaccagacgact

SEQ ID NO: 9706 - DNA, 17 bp, Homo sapiens
catttaccagacgactg

SEQ ID NO: 9707 - DNA, 17 bp, Homo sapiens
atttaccagacgactgg

SEQ ID NO: 9708 - DNA, 17 bp, Homo sapiens
tttaccagacgactggg

SEQ ID NO: 9709 - DNA, 17 bp, Homo sapiens
ttaccagacgactgggg

SEQ ID NO: 9710 - DNA, 17 bp, Homo sapiens
taccagacgactggggc

SEQ ID NO: 9711 - DNA, 17 bp, Homo sapiens
accagacgactggggcc

SEQ ID NO: 9712 - DNA, 17 bp, Homo sapiens
ccagacgactggggcct

SEQ ID NO: 9713 - DNA, 17 bp, Homo sapiens
cagacgactggggcctc

SEQ ID NO: 9714 - DNA, 17 bp, Homo sapiens
agacgactggggcctcc

SEQ ID NO: 9715 - DNA, 17 bp, Homo sapiens
gacgactggggcctcca

SEQ ID NO: 9716 - DNA, 17 bp, Homo sapiens
acgactggggcctccac

SEQ ID NO: 9717 - DNA, 17 bp, Homo sapiens
cgactggggcctccaca

SEQ ID NO: 9718 - DNA, 17 bp, Homo sapiens
gactggggcctccacac

SEQ ID NO: 9719 - DNA, 17 bp, Homo sapiens
actggggcctccacact

SEQ ID NO: 9720 - DNA, 17 bp, Homo sapiens
ctggggcctccacacta

SEQ ID NO: 9721 - DNA, 17 bp, Homo sapiens
tggggcctccacactaa

SEQ ID NO: 9722 - DNA, 17 bp, Homo sapiens
ggggcctccacactaag

SEQ ID NO: 9723 - DNA, 17 bp, Homo sapiens
gggcctccacactaagg

SEQ ID NO: 9724 - DNA, 17 bp, Homo sapiens
ggcctccacactaagga

SEQ ID NO: 9725 - DNA, 17 bp, Homo sapiens
gcctccacactaaggag

SEQ ID NO: 9726 - DNA, 17 bp, Homo sapiens
cctccacactaaggagg

SEQ ID NO: 9727 - DNA, 17 bp, Homo sapiens
ctccacactaaggaggg

SEQ ID NO: 9728 - DNA, 17 bp, Homo sapiens
tccacactaaggagggg

SEQ ID NO: 9729 - DNA, 17 bp, Homo sapiens
ccacactaaggaggggc

SEQ ID NO: 9730 - DNA, 17 bp, Homo sapiens
cacactaaggaggggca

SEQ ID NO: 9731 - DNA, 17 bp, Homo sapiens
acactaaggaggggcag

SEQ ID NO: 9732 - DNA, 17 bp, Homo sapiens
cactaaggaggggcagg

SEQ ID NO: 9733 - DNA, 17 bp, Homo sapiens
actaaggaggggcaggg

SEQ ID NO: 9734 - DNA, 17 bp, Homo sapiens
ctaaggaggggcagggc

SEQ ID NO: 9735 - DNA, 17 bp, Homo sapiens
taaggaggggcagggct

SEQ ID NO: 9736 - DNA, 17 bp, Homo sapiens
aaggaggggcagggctg

SEQ ID NO: 9737 - DNA, 17 bp, Homo sapiens
aggaggggcagggctgg

SEQ ID NO: 9738 - DNA, 17 bp, Homo sapiens
ggaggggcagggctggc

SEQ ID NO: 9739 - DNA, 17 bp, Homo sapiens
gaggggcagggctggca

SEQ ID NO: 9740 - DNA, 17 bp, Homo sapiens
aggggcagggctggcag

SEQ ID NO: 9741 - DNA, 17 bp, Homo sapiens
ggggcagggctggcagt

SEQ ID NO: 9742 - DNA, 17 bp, Homo sapiens
gggcagggctggcagtg

SEQ ID NO: 9743 - DNA, 17 bp, Homo sapiens
ggcagggctggcagtga

SEQ ID NO: 9744 - DNA, 17 bp, Homo sapiens
gcagggctggcagtgac

SEQ ID NO: 9745 - DNA, 17 bp, Homo sapiens
cagggctggcagtgacg

SEQ ID NO: 9746 - DNA, 17 bp, Homo sapiens
agggctggcagtgacga

SEQ ID NO: 9747 - DNA, 17 bp, Homo sapiens
gggctggcagtgacgag

SEQ ID NO: 9748 - DNA, 17 bp, Homo sapiens
ggctggcagtgacgagg

SEQ ID NO: 9749 - DNA, 17 bp, Homo sapiens
gctggcagtgacgaggg

SEQ ID NO: 9750 - DNA, 17 bp, Homo sapiens
ctggcagtgacgaggga

SEQ ID NO: 9751 - DNA, 17 bp, Homo sapiens
tggcagtgacgagggaa

SEQ ID NO: 9752 - DNA, 17 bp, Homo sapiens
ggcagtgacgagggaaa

SEQ ID NO: 9753 - DNA, 17 bp, Homo sapiens
gcagtgacgagggaaac

SEQ ID NO: 9754 - DNA, 17 bp, Homo sapiens
cagtgacgagggaaacc

SEQ ID NO: 9755 - DNA, 17 bp, Homo sapiens
agtgacgagggaaacct

SEQ ID NO: 9756 - DNA, 17 bp, Homo sapiens
gtgacgagggaaacctc

SEQ ID NO: 9757 - DNA, 17 bp, Homo sapiens
tgacgagggaaacctct

SEQ ID NO: 9758 - DNA, 17 bp, Homo sapiens
gacgagggaaacctctc

SEQ ID NO: 9759 - DNA, 17 bp, Homo sapiens
acgagggaaacctctcg

SEQ ID NO: 9760 - DNA, 17 bp, Homo sapiens
cgagggaaacctctcgc

SEQ ID NO: 9761 - DNA, 17 bp, Homo sapiens
gagggaaacctctcgct

SEQ ID NO: 9762 - DNA, 17 bp, Homo sapiens
agggaaacctctcgctg

SEQ ID NO: 9763 - DNA, 17 bp, Homo sapiens
gggaaacctctcgctga

SEQ ID NO: 9764 - DNA, 17 bp, Homo sapiens
ggaaacctctcgctgag

SEQ ID NO: 9765 - DNA, 17 bp, Homo sapiens
gaaacctctcgctgagg

SEQ ID NO: 9766 - DNA, 17 bp, Homo sapiens
aaacctctcgctgaggg

SEQ ID NO: 9767 - DNA, 17 bp, Homo sapiens
aacctctcgctgagggt

SEQ ID NO: 9768 - DNA, 17 bp, Homo sapiens
acctctcgctgagggtt

SEQ ID NO: 9769 - DNA, 17 bp, Homo sapiens
cctctcgctgagggttg

SEQ ID NO: 9770 - DNA, 17 bp, Homo sapiens
ctctcgctgagggttgg

SEQ ID NO: 9771 - DNA, 17 bp, Homo sapiens
tctcgctgagggttggg

SEQ ID NO: 9772 - DNA, 17 bp, Homo sapiens
ctcgctgagggttgggg

SEQ ID NO: 9773 - DNA, 17 bp, Homo sapiens
tcgctgagggttggggc

SEQ ID NO: 9774 - DNA, 17 bp, Homo sapiens
cgctgagggttggggca

SEQ ID NO: 9775 - DNA, 17 bp, Homo sapiens
gctgagggttggggcaa

SEQ ID NO: 9776 - DNA, 17 bp, Homo sapiens
ctgagggttggggcaaa

SEQ ID NO: 9777 - DNA, 17 bp, Homo sapiens
tgagggttggggcaaag

SEQ ID NO: 9778 - DNA, 17 bp, Homo sapiens
gagggttggggcaaagt

SEQ ID NO: 9779 - DNA, 17 bp, Homo sapiens
agggttggggcaaagtc

SEQ ID NO: 9780 - DNA, 17 bp, Homo sapiens
gggttggggcaaagtca

SEQ ID NO: 9781 - DNA, 17 bp, Homo sapiens
ggttggggcaaagtcac

SEQ ID NO: 9782 - DNA, 17 bp, Homo sapiens
gttggggcaaagtcacc

SEQ ID NO: 9783 - DNA, 17 bp, Homo sapiens
ttggggcaaagtcaccc

SEQ ID NO: 9784 - DNA, 17 bp, Homo sapiens
tggggcaaagtcacccc

SEQ ID NO: 9785 - DNA, 17 bp, Homo sapiens
ggggcaaagtcacccct

SEQ ID NO: 9786 - DNA, 17 bp, Homo sapiens
gggcaaagtcacccctg

SEQ ID NO: 9787 - DNA, 17 bp, Homo sapiens
ggcaaagtcacccctgg

SEQ ID NO: 9788 - DNA, 17 bp, Homo sapiens
gcaaagtcacccctgga

SEQ ID NO: 9789 - DNA, 17 bp, Homo sapiens
caaagtcacccctggaa

SEQ ID NO: 9790 - DNA, 17 bp, Homo sapiens
aaagtcacccctggaaa

SEQ ID NO: 9791 - DNA, 17 bp, Homo sapiens
aagtcacccctggaaat

SEQ ID NO: 9792 - DNA, 17 bp, Homo sapiens
agtcacccctggaaatc

SEQ ID NO: 9793 - DNA, 17 bp, Homo sapiens
gtcacccctggaaatcg

SEQ ID NO: 9794 - DNA, 17 bp, Homo sapiens
tcacccctggaaatcga

SEQ ID NO: 9795 - DNA, 17 bp, Homo sapiens
cacccctggaaatcgaa

SEQ ID NO: 9796 - DNA, 17 bp, Homo sapiens
acccctggaaatcgaag

SEQ ID NO: 9797 - DNA, 17 bp, Homo sapiens
cccctggaaatcgaagg

SEQ ID NO: 9798 - DNA, 17 bp, Homo sapiens
ccctggaaatcgaaggg

SEQ ID NO: 9799 - DNA, 17 bp, Homo sapiens
cctggaaatcgaagggg

SEQ ID NO: 9800 - DNA, 17 bp, Homo sapiens
ctggaaatcgaaggggc

SEQ ID NO: 9801 - DNA, 17 bp, Homo sapiens
tggaaatcgaaggggcc

SEQ ID NO: 9802 - DNA, 17 bp, Homo sapiens
ggaaatcgaaggggccg

SEQ ID NO: 9803 - DNA, 17 bp, Homo sapiens
gaaatcgaaggggccgc

SEQ ID NO: 9804 - DNA, 17 bp, Homo sapiens
aaatcgaaggggccgct

SEQ ID NO: 9805 - DNA, 17 bp, Homo sapiens
aatcgaaggggccgctg

SEQ ID NO: 9806 - DNA, 17 bp, Homo sapiens
atcgaaggggccgctgg

SEQ ID NO: 9807 - DNA, 17 bp, Homo sapiens
tcgaaggggccgctggt

SEQ ID NO: 9808 - DNA, 17 bp, Homo sapiens
cgaaggggccgctggtg

SEQ ID NO: 9809 - DNA, 17 bp, Homo sapiens
gaaggggccgctggtgg

SEQ ID NO: 9810 - DNA, 17 bp, Homo sapiens
aaggggccgctggtggt

SEQ ID NO: 9811 - DNA, 17 bp, Homo sapiens
aggggccgctggtggtc

SEQ ID NO: 9812 - DNA, 17 bp, Homo sapiens
ggggccgctggtggtct

SEQ ID NO: 9813 - DNA, 17 bp, Homo sapiens
gggccgctggtggtctc

SEQ ID NO: 9814 - DNA, 17 bp, Homo sapiens
ggccgctggtggtctct

SEQ ID NO: 9815 - DNA, 17 bp, Homo sapiens
gccgctggtggtctctt

SEQ ID NO: 9816 - DNA, 17 bp, Homo sapiens
ccgctggtggtctcttg

SEQ ID NO: 9817 - DNA, 17 bp, Homo sapiens
cgctggtggtctcttga

SEQ ID NO: 9818 - DNA, 17 bp, Homo sapiens
gctggtggtctcttgag

SEQ ID NO: 9819 - DNA, 17 bp, Homo sapiens
ctggtggtctcttgagg

SEQ ID NO: 9820 - DNA, 17 bp, Homo sapiens
tggtggtctcttgaggt

SEQ ID NO: 9821 - DNA, 17 bp, Homo sapiens
ggtggtctcttgaggtc

SEQ ID NO: 9822 - DNA, 17 bp, Homo sapiens
gtggtctcttgaggtcc

SEQ ID NO: 9823 - DNA, 17 bp, Homo sapiens
tggtctcttgaggtcca

SEQ ID NO: 9824 - DNA, 17 bp, Homo sapiens
ggtctcttgaggtccac

SEQ ID NO: 9825 - DNA, 17 bp, Homo sapiens
gtctcttgaggtccacc

SEQ ID NO: 9826 - DNA, 17 bp, Homo sapiens
tctcttgaggtccacca

SEQ ID NO: 9827 - DNA, 17 bp, Homo sapiens
ctcttgaggtccaccag

SEQ ID NO: 9828 - DNA, 17 bp, Homo sapiens
tcttgaggtccaccagc

SEQ ID NO: 9829 - DNA, 17 bp, Homo sapiens
cttgaggtccaccagcc

SEQ ID NO: 9830 - DNA, 17 bp, Homo sapiens
ttgaggtccaccagcct

SEQ ID NO: 9831 - DNA, 17 bp, Homo sapiens
tgaggtccaccagcctc

SEQ ID NO: 9832 - DNA, 17 bp, Homo sapiens
gaggtccaccagcctca

SEQ ID NO: 9833 - DNA, 17 bp, Homo sapiens
aggtccaccagcctcaa

SEQ ID NO: 9834 - DNA, 17 bp, Homo sapiens
ggtccaccagcctcaaa

SEQ ID NO: 9835 - DNA, 17 bp, Homo sapiens
gtccaccagcctcaaat

SEQ ID NO: 9836 - DNA, 17 bp, Homo sapiens
tccaccagcctcaaatg

SEQ ID NO: 9837 - DNA, 17 bp, Homo sapiens
ccaccagcctcaaatgc

SEQ ID NO: 9838 - DNA, 17 bp, Homo sapiens
caccagcctcaaatgca

SEQ ID NO: 9839 - DNA, 17 bp, Homo sapiens
accagcctcaaatgcat

SEQ ID NO: 9840 - DNA, 17 bp, Homo sapiens
ccagcctcaaatgcatc

SEQ ID NO: 9841 - DNA, 17 bp, Homo sapiens
cagcctcaaatgcatct

SEQ ID NO: 9842 - DNA, 17 bp, Homo sapiens
agcctcaaatgcatctc

SEQ ID NO: 9843 - DNA, 17 bp, Homo sapiens
gcctcaaatgcatctct

SEQ ID NO: 9844 - DNA, 17 bp, Homo sapiens
cctcaaatgcatctctt

SEQ ID NO: 9845 - DNA, 17 bp, Homo sapiens
ctcaaatgcatctcttc

SEQ ID NO: 9846 - DNA, 17 bp, Homo sapiens
tcaaatgcatctcttca

SEQ ID NO: 9847 - DNA, 17 bp, Homo sapiens
caaatgcatctcttcag

SEQ ID NO: 9848 - DNA, 17 bp, Homo sapiens
aaatgcatctcttcaga

SEQ ID NO: 9849 - DNA, 17 bp, Homo sapiens
aatgcatctcttcagac

SEQ ID NO: 9850 - DNA, 17 bp, Homo sapiens
atgcatctcttcagacg

SEQ ID NO: 9851 - DNA, 17 bp, Homo sapiens
tgcatctcttcagacgg

SEQ ID NO: 9852 - DNA, 17 bp, Homo sapiens
gcatctcttcagacggt

SEQ ID NO: 9853 - DNA, 17 bp, Homo sapiens
catctcttcagacggtg

SEQ ID NO: 9854 - DNA, 17 bp, Homo sapiens
atctcttcagacggtgt

SEQ ID NO: 9855 - DNA, 17 bp, Homo sapiens
tctcttcagacggtgtt

SEQ ID NO: 9856 - DNA, 17 bp, Homo sapiens
ctcttcagacggtgttg

SEQ ID NO: 9857 - DNA, 17 bp, Homo sapiens
tcttcagacggtgttgg

SEQ ID NO: 9858 - DNA, 17 bp, Homo sapiens
cttcagacggtgttggg

SEQ ID NO: 9859 - DNA, 17 bp, Homo sapiens
ttcagacggtgttgggg

SEQ ID NO: 9860 - DNA, 17 bp, Homo sapiens
tcagacggtgttggggg

SEQ ID NO: 9861 - DNA, 17 bp, Homo sapiens
cagacggtgttgggggc

SEQ ID NO: 9862 - DNA, 17 bp, Homo sapiens
agacggtgttgggggca

SEQ ID NO: 9863 - DNA, 17 bp, Homo sapiens
gacggtgttgggggcac

SEQ ID NO: 9864 - DNA, 17 bp, Homo sapiens
acggtgttgggggcaca

SEQ ID NO: 9865 - DNA, 17 bp, Homo sapiens
cggtgttgggggcacaa

SEQ ID NO: 9866 - DNA, 17 bp, Homo sapiens
ggtgttgggggcacaac

SEQ ID NO: 9867 - DNA, 17 bp, Homo sapiens
gtgttgggggcacaacc

SEQ ID NO: 9868 - DNA, 17 bp, Homo sapiens
tgttgggggcacaaccc

SEQ ID NO: 9869 - DNA, 17 bp, Homo sapiens
gttgggggcacaaccct

SEQ ID NO: 9870 - DNA, 17 bp, Homo sapiens
ttgggggcacaacccta

SEQ ID NO: 9871 - DNA, 17 bp, Homo sapiens
tgggggcacaaccctac

SEQ ID NO: 9872 - DNA, 17 bp, Homo sapiens
gggggcacaaccctact

SEQ ID NO: 9873 - DNA, 17 bp, Homo sapiens
ggggcacaaccctactc

SEQ ID NO: 9874 - DNA, 17 bp, Homo sapiens
gggcacaaccctactcc

SEQ ID NO: 9875 - DNA, 17 bp, Homo sapiens
ggcacaaccctactccc

SEQ ID NO: 9876 - DNA, 17 bp, Homo sapiens
gcacaaccctactcccc

SEQ ID NO: 9877 - DNA, 17 bp, Homo sapiens
cacaaccctactccccg

SEQ ID NO: 9878 - DNA, 17 bp, Homo sapiens
acaaccctactccccga

SEQ ID NO: 9879 - DNA, 17 bp, Homo sapiens
caaccctactccccgaa

SEQ ID NO: 9880 - DNA, 17 bp, Homo sapiens
aaccctactccccgaaa

SEQ ID NO: 9881 - DNA, 17 bp, Homo sapiens
accctactccccgaaaa

SEQ ID NO: 9882 - DNA, 17 bp, Homo sapiens
ccctactccccgaaaag

SEQ ID NO: 9883 - DNA, 17 bp, Homo sapiens
cctactccccgaaaagt

SEQ ID NO: 9884 - DNA, 17 bp, Homo sapiens
ctactccccgaaaagtc

SEQ ID NO: 9885 - DNA, 17 bp, Homo sapiens
tactccccgaaaagtcg

SEQ ID NO: 9886 - DNA, 17 bp, Homo sapiens
actccccgaaaagtcga

SEQ ID NO: 9887 - DNA, 17 bp, Homo sapiens
ctccccgaaaagtcgaa

SEQ ID NO: 9888 - DNA, 17 bp, Homo sapiens
tccccgaaaagtcgaaa

SEQ ID NO: 9889 - DNA, 17 bp, Homo sapiens
ccccgaaaagtcgaaaa

SEQ ID NO: 9890 - DNA, 17 bp, Homo sapiens
cccgaaaagtcgaaaac

SEQ ID NO: 9891 - DNA, 17 bp, Homo sapiens
ccgaaaagtcgaaaacc

SEQ ID NO: 9892 - DNA, 17 bp, Homo sapiens
cgaaaagtcgaaaaccc

SEQ ID NO: 9893 - DNA, 17 bp, Homo sapiens
gaaaagtcgaaaaccca

SEQ ID NO: 9894 - DNA, 17 bp, Homo sapiens
aaaagtcgaaaacccaa

SEQ ID NO: 9895 - DNA, 17 bp, Homo sapiens
aaagtcgaaaacccaat

SEQ ID NO: 9896 - DNA, 17 bp, Homo sapiens
aagtcgaaaacccaatt

SEQ ID NO: 9897 - DNA, 17 bp, Homo sapiens
agtcgaaaacccaattc

SEQ ID NO: 9898 - DNA, 17 bp, Homo sapiens
gtcgaaaacccaattca

SEQ ID NO: 9899 - DNA, 17 bp, Homo sapiens
tcgaaaacccaattcag

SEQ ID NO: 9900 - DNA, 17 bp, Homo sapiens
cgaaaacccaattcagt

SEQ ID NO: 9901 - DNA, 17 bp, Homo sapiens
gaaaacccaattcagtt

SEQ ID NO: 9902 - DNA, 17 bp, Homo sapiens
aaaacccaattcagttc

SEQ ID NO: 9903 - DNA, 17 bp, Homo sapiens
aaacccaattcagttcc

SEQ ID NO: 9904 - DNA, 17 bp, Homo sapiens
aacccaattcagttcct

SEQ ID NO: 9905 - DNA, 17 bp, Homo sapiens
acccaattcagttcctg

SEQ ID NO: 9906 - DNA, 17 bp, Homo sapiens
cccaattcagttcctgc

SEQ ID NO: 9907 - DNA, 17 bp, Homo sapiens
ccaattcagttcctgcg

SEQ ID NO: 9908 - DNA, 17 bp, Homo sapiens
caattcagttcctgcga

SEQ ID NO: 9909 - DNA, 17 bp, Homo sapiens
aattcagttcctgcgag

SEQ ID NO: 9910 - DNA, 17 bp, Homo sapiens
attcagttcctgcgagt

SEQ ID NO: 9911 - DNA, 17 bp, Homo sapiens
ttcagttcctgcgagtc

SEQ ID NO: 9912 - DNA, 17 bp, Homo sapiens
tcagttcctgcgagtcc

SEQ ID NO: 9913 - DNA, 17 bp, Homo sapiens
cagttcctgcgagtccc

SEQ ID NO: 9914 - DNA, 17 bp, Homo sapiens
agttcctgcgagtccct

SEQ ID NO: 9915 - DNA, 17 bp, Homo sapiens
gttcctgcgagtccctc

SEQ ID NO: 9916 - DNA, 17 bp, Homo sapiens
ttcctgcgagtccctct

SEQ ID NO: 9917 - DNA, 17 bp, Homo sapiens
tcctgcgagtccctctt

SEQ ID NO: 9918 - DNA, 17 bp, Homo sapiens
cctgcgagtccctctta

SEQ ID NO: 9919 - DNA, 17 bp, Homo sapiens
ctgcgagtccctcttag

SEQ ID NO: 9920 - DNA, 17 bp, Homo sapiens
tgcgagtccctcttaga

SEQ ID NO: 9921 - DNA, 17 bp, Homo sapiens
gcgagtccctcttagaa

SEQ ID NO: 9922 - DNA, 17 bp, Homo sapiens
cgagtccctcttagaat

SEQ ID NO: 9923 - DNA, 17 bp, Homo sapiens
gagtccctcttagaatc

SEQ ID NO: 9924 - DNA, 17 bp, Homo sapiens
agtccctcttagaatcc

SEQ ID NO: 9925 - DNA, 17 bp, Homo sapiens
gtccctcttagaatcca

SEQ ID NO: 9926 - DNA, 17 bp, Homo sapiens
tccctcttagaatccag

SEQ ID NO: 9927 - DNA, 17 bp, Homo sapiens
ccctcttagaatccaga

SEQ ID NO: 9928 - DNA, 17 bp, Homo sapiens
cctcttagaatccagac

SEQ ID NO: 9929 - DNA, 17 bp, Homo sapiens
ctcttagaatccagacc

SEQ ID NO: 9930 - DNA, 17 bp, Homo sapiens
tcttagaatccagaccg

SEQ ID NO: 9931 - DNA, 17 bp, Homo sapiens
cttagaatccagaccga

SEQ ID NO: 9932 - DNA, 17 bp, Homo sapiens
ttagaatccagaccgag

SEQ ID NO: 9933 - DNA, 17 bp, Homo sapiens
tagaatccagaccgagc

SEQ ID NO: 9934 - DNA, 17 bp, Homo sapiens
agaatccagaccgagca

SEQ ID NO: 9935 - DNA, 17 bp, Homo sapiens
gaatccagaccgagcat

SEQ ID NO: 9936 - DNA, 17 bp, Homo sapiens
aatccagaccgagcatg

SEQ ID NO: 9937 - DNA, 17 bp, Homo sapiens
atccagaccgagcatgg

SEQ ID NO: 9938 - DNA, 17 bp, Homo sapiens
tccagaccgagcatggg

SEQ ID NO: 9939 - DNA, 17 bp, Homo sapiens
ccagaccgagcatgggg

SEQ ID NO: 9940 - DNA, 17 bp, Homo sapiens
cagaccgagcatgggga

SEQ ID NO: 9941 - DNA, 17 bp, Homo sapiens
agaccgagcatggggag

SEQ ID NO: 9942 - DNA, 17 bp, Homo sapiens
gaccgagcatggggaga

SEQ ID NO: 9943 - DNA, 17 bp, Homo sapiens
accgagcatggggagaa

SEQ ID NO: 9944 - DNA, 17 bp, Homo sapiens
ccgagcatggggagaaa

SEQ ID NO: 9945 - DNA, 17 bp, Homo sapiens
cgagcatggggagaaaa

SEQ ID NO: 9946 - DNA, 17 bp, Homo sapiens
gagcatggggagaaaac

SEQ ID NO: 9947 - DNA, 17 bp, Homo sapiens
agcatggggagaaaact

SEQ ID NO: 9948 - DNA, 17 bp, Homo sapiens
gcatggggagaaaactg

SEQ ID NO: 9949 - DNA, 17 bp, Homo sapiens
catggggagaaaactga

SEQ ID NO: 9950 - DNA, 17 bp, Homo sapiens
atggggagaaaactgag

SEQ ID NO: 9951 - DNA, 17 bp, Homo sapiens
tggggagaaaactgagc

SEQ ID NO: 9952 - DNA, 17 bp, Homo sapiens
ggggagaaaactgagct

SEQ ID NO: 9953 - DNA, 17 bp, Homo sapiens
gggagaaaactgagctc

SEQ ID NO: 9954 - DNA, 17 bp, Homo sapiens
ggagaaaactgagctct

SEQ ID NO: 9955 - DNA, 17 bp, Homo sapiens
gagaaaactgagctctc

SEQ ID NO: 9956 - DNA, 17 bp, Homo sapiens
agaaaactgagctctcc

SEQ ID NO: 9957 - DNA, 17 bp, Homo sapiens
gaaaactgagctctccg

SEQ ID NO: 9958 - DNA, 17 bp, Homo sapiens
aaaactgagctctccga

SEQ ID NO: 9959 - DNA, 17 bp, Homo sapiens
aaactgagctctccgac

SEQ ID NO: 9960 - DNA, 17 bp, Homo sapiens
aactgagctctccgacc

SEQ ID NO: 9961 - DNA, 17 bp, Homo sapiens
actgagctctccgacca

SEQ ID NO: 9962 - DNA, 17 bp, Homo sapiens
ctgagctctccgaccac

SEQ ID NO: 9963 - DNA, 17 bp, Homo sapiens
tgagctctccgaccaca

SEQ ID NO: 9964 - DNA, 17 bp, Homo sapiens
gagctctccgaccacac

SEQ ID NO: 9965 - DNA, 17 bp, Homo sapiens
agctctccgaccacacc

SEQ ID NO: 9966 - DNA, 17 bp, Homo sapiens
gctctccgaccacaccc

SEQ ID NO: 9967 - DNA, 17 bp, Homo sapiens
ctctccgaccacaccca

SEQ ID NO: 9968 - DNA, 17 bp, Homo sapiens
tctccgaccacacccag

SEQ ID NO: 9969 - DNA, 17 bp, Homo sapiens
ctccgaccacacccagg

SEQ ID NO: 9970 - DNA, 17 bp, Homo sapiens
tccgaccacacccaggg

SEQ ID NO: 9971 - DNA, 17 bp, Homo sapiens
ccgaccacacccaggga

SEQ ID NO: 9972 - DNA, 17 bp, Homo sapiens
cgaccacacccagggac

SEQ ID NO: 9973 - DNA, 17 bp, Homo sapiens
gaccacacccagggaca

SEQ ID NO: 9974 - DNA, 17 bp, Homo sapiens
accacacccagggacat

SEQ ID NO: 9975 - DNA, 17 bp, Homo sapiens
ccacacccagggacatg

SEQ ID NO: 9976 - DNA, 17 bp, Homo sapiens
cacacccagggacatgc

SEQ ID NO: 9977 - DNA, 17 bp, Homo sapiens
acacccagggacatgct

SEQ ID NO: 9978 - DNA, 17 bp, Homo sapiens
cacccagggacatgctg

SEQ ID NO: 9979 - DNA, 17 bp, Homo sapiens
acccagggacatgctgt

SEQ ID NO: 9980 - DNA, 17 bp, Homo sapiens
cccagggacatgctgtt

SEQ ID NO: 9981 - DNA, 17 bp, Homo sapiens
ccagggacatgctgttg

SEQ ID NO: 9982 - DNA, 17 bp, Homo sapiens
cagggacatgctgttgt

SEQ ID NO: 9983 - DNA, 17 bp, Homo sapiens
agggacatgctgttgtc

SEQ ID NO: 9984 - DNA, 17 bp, Homo sapiens
gggacatgctgttgtcg

SEQ ID NO: 9985 - DNA, 17 bp, Homo sapiens
ggacatgctgttgtcgc

SEQ ID NO: 9986 - DNA, 17 bp, Homo sapiens
gacatgctgttgtcgcc

SEQ ID NO: 9987 - DNA, 17 bp, Homo sapiens
acatgctgttgtcgccc

SEQ ID NO: 9988 - DNA, 17 bp, Homo sapiens
catgctgttgtcgccca

SEQ ID NO: 9989 - DNA, 17 bp, Homo sapiens
atgctgttgtcgcccac

SEQ ID NO: 9990 - DNA, 17 bp, Homo sapiens
tgctgttgtcgcccaca

SEQ ID NO: 9991 - DNA, 17 bp, Homo sapiens
gctgttgtcgcccacac

SEQ ID NO: 9992 - DNA, 17 bp, Homo sapiens
ctgttgtcgcccacact

SEQ ID NO: 9993 - DNA, 17 bp, Homo sapiens
tgttgtcgcccacactg

SEQ ID NO: 9994 - DNA, 17 bp, Homo sapiens
gttgtcgcccacactgc

SEQ ID NO: 9995 - DNA, 17 bp, Homo sapiens
ttgtcgcccacactgcg

SEQ ID NO: 9996 - DNA, 17 bp, Homo sapiens
tgtcgcccacactgcgt

SEQ ID NO: 9997 - DNA, 17 bp, Homo sapiens
gtcgcccacactgcgtc

SEQ ID NO: 9998 - DNA, 17 bp, Homo sapiens
tcgcccacactgcgtcc

SEQ ID NO: 9999 - DNA, 17 bp, Homo sapiens
cgcccacactgcgtcct

SEQ ID NO: 10000 - DNA, 17 bp, Homo sapiens
gcccacactgcgtcctc

SEQ ID NO: 10001 - DNA, 17 bp, Homo sapiens
cccacactgcgtcctcg

SEQ ID NO: 10002 - DNA, 17 bp, Homo sapiens
ccacactgcgtcctcgg

SEQ ID NO: 10003 - DNA, 17 bp, Homo sapiens
cacactgcgtcctcgga

SEQ ID NO: 10004 - DNA, 17 bp, Homo sapiens
acactgcgtcctcggag

SEQ ID NO: 10005 - DNA, 17 bp, Homo sapiens
cactgcgtcctcggagg

SEQ ID NO: 10006 - DNA, 17 bp, Homo sapiens
actgcgtcctcggaggc

SEQ ID NO: 10007 - DNA, 17 bp, Homo sapiens
ctgcgtcctcggaggcg

SEQ ID NO: 10008 - DNA, 17 bp, Homo sapiens
tgcgtcctcggaggcgg

SEQ ID NO: 10009 - DNA, 17 bp, Homo sapiens
gcgtcctcggaggcggt

SEQ ID NO: 10010 - DNA, 17 bp, Homo sapiens
cgtcctcggaggcggtg

SEQ ID NO: 10011 - DNA, 17 bp, Homo sapiens
gtcctcggaggcggtgt

SEQ ID NO: 10012 - DNA, 17 bp, Homo sapiens
tcctcggaggcggtgtc

SEQ ID NO: 10013 - DNA, 17 bp, Homo sapiens
cctcggaggcggtgtct

SEQ ID NO: 10014 - DNA, 17 bp, Homo sapiens
ctcggaggcggtgtctg

SEQ ID NO: 10015 - DNA, 17 bp, Homo sapiens
tcggaggcggtgtctgg

SEQ ID NO: 10016 - DNA, 17 bp, Homo sapiens
cggaggcggtgtctgga

SEQ ID NO: 10017 - DNA, 17 bp, Homo sapiens
ggaggcggtgtctggag

SEQ ID NO: 10018 - DNA, 17 bp, Homo sapiens
gaggcggtgtctggagt

SEQ ID NO: 10019 - DNA, 17 bp, Homo sapiens
aggcggtgtctggagtc

SEQ ID NO: 10020 - DNA, 17 bp, Homo sapiens
ggcggtgtctggagtcc

SEQ ID NO: 10021 - DNA, 17 bp, Homo sapiens
gcggtgtctggagtcct

SEQ ID NO: 10022 - DNA, 17 bp, Homo sapiens
cggtgtctggagtcctc

SEQ ID NO: 10023 - DNA, 17 bp, Homo sapiens
ggtgtctggagtcctct

SEQ ID NO: 10024 - DNA, 17 bp, Homo sapiens
gtgtctggagtcctctg

SEQ ID NO: 10025 - DNA, 17 bp, Homo sapiens
tgtctggagtcctctgt

SEQ ID NO: 10026 - DNA, 17 bp, Homo sapiens
gtctggagtcctctgtg

SEQ ID NO: 10027 - DNA, 17 bp, Homo sapiens
tctggagtcctctgtgg

SEQ ID NO: 10028 - DNA, 17 bp, Homo sapiens
ctggagtcctctgtgga

SEQ ID NO: 10029 - DNA, 17 bp, Homo sapiens
tggagtcctctgtggac

SEQ ID NO: 10030 - DNA, 17 bp, Homo sapiens
ggagtcctctgtggacg

SEQ ID NO: 10031 - DNA, 17 bp, Homo sapiens
gagtcctctgtggacga

SEQ ID NO: 10032 - DNA, 17 bp, Homo sapiens
agtcctctgtggacgat

SEQ ID NO: 10033 - DNA, 17 bp, Homo sapiens
gtcctctgtggacgatg

SEQ ID NO: 10034 - DNA, 17 bp, Homo sapiens
tcctctgtggacgatgc

SEQ ID NO: 10035 - DNA, 17 bp, Homo sapiens
cctctgtggacgatgcg

SEQ ID NO: 10036 - DNA, 17 bp, Homo sapiens
ctctgtggacgatgcgg

SEQ ID NO: 10037 - DNA, 17 bp, Homo sapiens
tctgtggacgatgcggg

SEQ ID NO: 10038 - DNA, 17 bp, Homo sapiens
ctgtggacgatgcgggc

SEQ ID NO: 10039 - DNA, 17 bp, Homo sapiens
tgtggacgatgcgggct

SEQ ID NO: 10040 - DNA, 17 bp, Homo sapiens
gtggacgatgcgggctg

SEQ ID NO: 10041 - DNA, 17 bp, Homo sapiens
tggacgatgcgggctgt

SEQ ID NO: 10042 - DNA, 17 bp, Homo sapiens
ggacgatgcgggctgtc

SEQ ID NO: 10043 - DNA, 17 bp, Homo sapiens
gacgatgcgggctgtcc

SEQ ID NO: 10044 - DNA, 17 bp, Homo sapiens
acgatgcgggctgtcca

SEQ ID NO: 10045 - DNA, 17 bp, Homo sapiens
cgatgcgggctgtccag

SEQ ID NO: 10046 - DNA, 17 bp, Homo sapiens
gatgcgggctgtccaga

SEQ ID NO: 10047 - DNA, 17 bp, Homo sapiens
atgcgggctgtccagac

SEQ ID NO: 10048 - DNA, 17 bp, Homo sapiens
tgcgggctgtccagacc

SEQ ID NO: 10049 - DNA, 17 bp, Homo sapiens
gcgggctgtccagacct

SEQ ID NO: 10050 - DNA, 17 bp, Homo sapiens
cgggctgtccagacctt

SEQ ID NO: 10051 - DNA, 17 bp, Homo sapiens
gggctgtccagaccttg

SEQ ID NO: 10052 - DNA, 17 bp, Homo sapiens
ggctgtccagaccttgg

SEQ ID NO: 10053 - DNA, 17 bp, Homo sapiens
gctgtccagaccttgga

SEQ ID NO: 10054 - DNA, 17 bp, Homo sapiens
ctgtccagaccttggaa

SEQ ID NO: 10055 - DNA, 17 bp, Homo sapiens
tgtccagaccttggaaa

SEQ ID NO: 10056 - DNA, 17 bp, Homo sapiens
gtccagaccttggaaag

SEQ ID NO: 10057 - DNA, 17 bp, Homo sapiens
tccagaccttggaaagg

SEQ ID NO: 10058 - DNA, 17 bp, Homo sapiens
ccagaccttggaaagga

SEQ ID NO: 10059 - DNA, 17 bp, Homo sapiens
cagaccttggaaaggag

SEQ ID NO: 10060 - DNA, 17 bp, Homo sapiens
agaccttggaaaggagc

SEQ ID NO: 10061 - DNA, 17 bp, Homo sapiens
gaccttggaaaggagcc

SEQ ID NO: 10062 - DNA, 17 bp, Homo sapiens
accttggaaaggagccg

SEQ ID NO: 10063 - DNA, 17 bp, Homo sapiens
ccttggaaaggagccgc

SEQ ID NO: 10064 - DNA, 17 bp, Homo sapiens
cttggaaaggagccgct

SEQ ID NO: 10065 - DNA, 17 bp, Homo sapiens
ttggaaaggagccgctt

SEQ ID NO: 10066 - DNA, 17 bp, Homo sapiens
tggaaaggagccgcttg

SEQ ID NO: 10067 - DNA, 17 bp, Homo sapiens
ggaaaggagccgcttgt

SEQ ID NO: 10068 - DNA, 17 bp, Homo sapiens
gaaaggagccgcttgtt

SEQ ID NO: 10069 - DNA, 17 bp, Homo sapiens
aaaggagccgcttgttt

SEQ ID NO: 10070 - DNA, 17 bp, Homo sapiens
aaggagccgcttgtttt

SEQ ID NO: 10071 - DNA, 17 bp, Homo sapiens
aggagccgcttgttttc

SEQ ID NO: 10072 - DNA, 17 bp, Homo sapiens
ggagccgcttgttttcc

SEQ ID NO: 10073 - DNA, 17 bp, Homo sapiens
gagccgcttgttttcca

SEQ ID NO: 10074 - DNA, 17 bp, Homo sapiens
agccgcttgttttccag

SEQ ID NO: 10075 - DNA, 17 bp, Homo sapiens
gccgcttgttttccaga

SEQ ID NO: 10076 - DNA, 17 bp, Homo sapiens
ccgcttgttttccagaa

SEQ ID NO: 10077 - DNA, 17 bp, Homo sapiens
cgcttgttttccagaac

SEQ ID NO: 10078 - DNA, 17 bp, Homo sapiens
gcttgttttccagaacc

SEQ ID NO: 10079 - DNA, 17 bp, Homo sapiens
cttgttttccagaaccg

SEQ ID NO: 10080 - DNA, 17 bp, Homo sapiens
ttgttttccagaaccgc

SEQ ID NO: 10081 - DNA, 17 bp, Homo sapiens
tgttttccagaaccgcc

SEQ ID NO: 10082 - DNA, 17 bp, Homo sapiens
gttttccagaaccgcca

SEQ ID NO: 10083 - DNA, 17 bp, Homo sapiens
ttttccagaaccgccag

SEQ ID NO: 10084 - DNA, 17 bp, Homo sapiens
tttccagaaccgccagt

SEQ ID NO: 10085 - DNA, 17 bp, Homo sapiens
ttccagaaccgccagtt

SEQ ID NO: 10086 - DNA, 17 bp, Homo sapiens
tccagaaccgccagttt

SEQ ID NO: 10087 - DNA, 17 bp, Homo sapiens
ccagaaccgccagtttg

SEQ ID NO: 10088 - DNA, 17 bp, Homo sapiens
cagaaccgccagtttgc

SEQ ID NO: 10089 - DNA, 17 bp, Homo sapiens
agaaccgccagtttgcc

SEQ ID NO: 10090 - DNA, 17 bp, Homo sapiens
gaaccgccagtttgccc

SEQ ID NO: 10091 - DNA, 17 bp, Homo sapiens
aaccgccagtttgccca

SEQ ID NO: 10092 - DNA, 17 bp, Homo sapiens
accgccagtttgcccac

SEQ ID NO: 10093 - DNA, 17 bp, Homo sapiens
ccgccagtttgcccacc

SEQ ID NO: 10094 - DNA, 17 bp, Homo sapiens
cgccagtttgcccacct

SEQ ID NO: 10095 - DNA, 17 bp, Homo sapiens
gccagtttgcccacctg

SEQ ID NO: 10096 - DNA, 17 bp, Homo sapiens
ccagtttgcccacctga

SEQ ID NO: 10097 - DNA, 17 bp, Homo sapiens
cagtttgcccacctgat

SEQ ID NO: 10098 - DNA, 17 bp, Homo sapiens
agtttgcccacctgatg

SEQ ID NO: 10099 - DNA, 17 bp, Homo sapiens
gtttgcccacctgatgg

SEQ ID NO: 10100 - DNA, 17 bp, Homo sapiens
tttgcccacctgatgga

SEQ ID NO: 10101 - DNA, 17 bp, Homo sapiens
ttgcccacctgatggag

SEQ ID NO: 10102 - DNA, 17 bp, Homo sapiens
tgcccacctgatggagg

SEQ ID NO: 10103 - DNA, 17 bp, Homo sapiens
gcccacctgatggagga

SEQ ID NO: 10104 - DNA, 17 bp, Homo sapiens
cccacctgatggaggaa

SEQ ID NO: 10105 - DNA, 17 bp, Homo sapiens
ccacctgatggaggaac

SEQ ID NO: 10106 - DNA, 17 bp, Homo sapiens
cacctgatggaggaacc

SEQ ID NO: 10107 - DNA, 17 bp, Homo sapiens
acctgatggaggaacct

SEQ ID NO: 10108 - DNA, 17 bp, Homo sapiens
cctgatggaggaacctc

SEQ ID NO: 10109 - DNA, 17 bp, Homo sapiens
ctgatggaggaacctct

SEQ ID NO: 10110 - DNA, 17 bp, Homo sapiens
tgatggaggaacctcta

SEQ ID NO: 10111 - DNA, 17 bp, Homo sapiens
gatggaggaacctctag

SEQ ID NO: 10112 - DNA, 17 bp, Homo sapiens
atggaggaacctctagg

SEQ ID NO: 10113 - DNA, 17 bp, Homo sapiens
tggaggaacctctaggc

SEQ ID NO: 10114 - DNA, 17 bp, Homo sapiens
ggaggaacctctaggca

SEQ ID NO: 10115 - DNA, 17 bp, Homo sapiens
gaggaacctctaggcag

SEQ ID NO: 10116 - DNA, 17 bp, Homo sapiens
aggaacctctaggcagt

SEQ ID NO: 10117 - DNA, 17 bp, Homo sapiens
ggaacctctaggcagtg

SEQ ID NO: 10118 - DNA, 17 bp, Homo sapiens
gaacctctaggcagtga

SEQ ID NO: 10119 - DNA, 17 bp, Homo sapiens
aacctctaggcagtgac

SEQ ID NO: 10120 - DNA, 17 bp, Homo sapiens
acctctaggcagtgacc

SEQ ID NO: 10121 - DNA, 17 bp, Homo sapiens
cctctaggcagtgaccc

SEQ ID NO: 10122 - DNA, 17 bp, Homo sapiens
ctctaggcagtgaccca

SEQ ID NO: 10123 - DNA, 17 bp, Homo sapiens
tctaggcagtgacccat

SEQ ID NO: 10124 - DNA, 17 bp, Homo sapiens
ctaggcagtgacccatt

SEQ ID NO: 10125 - DNA, 17 bp, Homo sapiens
taggcagtgacccattc

SEQ ID NO: 10126 - DNA, 17 bp, Homo sapiens
aggcagtgacccattca

SEQ ID NO: 10127 - DNA, 17 bp, Homo sapiens
ggcagtgacccattcag

SEQ ID NO: 10128 - DNA, 17 bp, Homo sapiens
gcagtgacccattcagc

SEQ ID NO: 10129 - DNA, 17 bp, Homo sapiens
cagtgacccattcagct

SEQ ID NO: 10130 - DNA, 17 bp, Homo sapiens
agtgacccattcagctg

SEQ ID NO: 10131 - DNA, 17 bp, Homo sapiens
gtgacccattcagctgg

SEQ ID NO: 10132 - DNA, 17 bp, Homo sapiens
tgacccattcagctgga

SEQ ID NO: 10133 - DNA, 17 bp, Homo sapiens
gacccattcagctggaa

SEQ ID NO: 10134 - DNA, 17 bp, Homo sapiens
acccattcagctggaaa

SEQ ID NO: 10135 - DNA, 17 bp, Homo sapiens
cccattcagctggaaac

SEQ ID NO: 10136 - DNA, 17 bp, Homo sapiens
ccattcagctggaaact

SEQ ID NO: 10137 - DNA, 17 bp, Homo sapiens
cattcagctggaaactc

SEQ ID NO: 10138 - DNA, 17 bp, Homo sapiens
attcagctggaaactcc

SEQ ID NO: 10139 - DNA, 17 bp, Homo sapiens
ttcagctggaaactccc

SEQ ID NO: 10140 - DNA, 17 bp, Homo sapiens
tcagctggaaactccca

SEQ ID NO: 10141 - DNA, 17 bp, Homo sapiens
cagctggaaactcccaa

SEQ ID NO: 10142 - DNA, 17 bp, Homo sapiens
agctggaaactcccaag

SEQ ID NO: 10143 - DNA, 17 bp, Homo sapiens
gctggaaactcccaagc

SEQ ID NO: 10144 - DNA, 17 bp, Homo sapiens
ctggaaactcccaagcc

SEQ ID NO: 10145 - DNA, 17 bp, Homo sapiens
tggaaactcccaagcct

SEQ ID NO: 10146 - DNA, 17 bp, Homo sapiens
ggaaactcccaagcctc

SEQ ID NO: 10147 - DNA, 17 bp, Homo sapiens
gaaactcccaagcctcg

SEQ ID NO: 10148 - DNA, 17 bp, Homo sapiens
aaactcccaagcctcga

SEQ ID NO: 10149 - DNA, 17 bp, Homo sapiens
aactcccaagcctcgac

SEQ ID NO: 10150 - DNA, 17 bp, Homo sapiens
actcccaagcctcgact

SEQ ID NO: 10151 - DNA, 17 bp, Homo sapiens
ctcccaagcctcgacta

SEQ ID NO: 10152 - DNA, 17 bp, Homo sapiens
tcccaagcctcgactac

SEQ ID NO: 10153 - DNA, 17 bp, Homo sapiens
cccaagcctcgactacg

SEQ ID NO: 10154 - DNA, 17 bp, Homo sapiens
ccaagcctcgactacga

SEQ ID NO: 10155 - DNA, 17 bp, Homo sapiens
caagcctcgactacgaa

SEQ ID NO: 10156 - DNA, 17 bp, Homo sapiens
aagcctcgactacgaac

SEQ ID NO: 10157 - DNA, 17 bp, Homo sapiens
agcctcgactacgaacg

SEQ ID NO: 10158 - DNA, 17 bp, Homo sapiens
gcctcgactacgaacgc

SEQ ID NO: 10159 - DNA, 17 bp, Homo sapiens
cctcgactacgaacgca

SEQ ID NO: 10160 - DNA, 17 bp, Homo sapiens
ctcgactacgaacgcaa

SEQ ID NO: 10161 - DNA, 17 bp, Homo sapiens
tcgactacgaacgcaag

SEQ ID NO: 10162 - DNA, 17 bp, Homo sapiens
cgactacgaacgcaaga

SEQ ID NO: 10163 - DNA, 17 bp, Homo sapiens
gactacgaacgcaagac

SEQ ID NO: 10164 - DNA, 17 bp, Homo sapiens
actacgaacgcaagacc

SEQ ID NO: 10165 - DNA, 17 bp, Homo sapiens
ctacgaacgcaagacca

SEQ ID NO: 10166 - DNA, 17 bp, Homo sapiens
tacgaacgcaagaccaa

SEQ ID NO: 10167 - DNA, 17 bp, Homo sapiens
acgaacgcaagaccaaa

SEQ ID NO: 10168 - DNA, 17 bp, Homo sapiens
cgaacgcaagaccaaag

SEQ ID NO: 10169 - DNA, 17 bp, Homo sapiens
gaacgcaagaccaaagt

SEQ ID NO: 10170 - DNA, 17 bp, Homo sapiens
aacgcaagaccaaagtg

SEQ ID NO: 10171 - DNA, 17 bp, Homo sapiens
acgcaagaccaaagtgg

SEQ ID NO: 10172 - DNA, 17 bp, Homo sapiens
cgcaagaccaaagtgga

SEQ ID NO: 10173 - DNA, 17 bp, Homo sapiens
gcaagaccaaagtggac

SEQ ID NO: 10174 - DNA, 17 bp, Homo sapiens
caagaccaaagtggact

SEQ ID NO: 10175 - DNA, 17 bp, Homo sapiens
aagaccaaagtggactt

SEQ ID NO: 10176 - DNA, 17 bp, Homo sapiens
agaccaaagtggacttc

SEQ ID NO: 10177 - DNA, 17 bp, Homo sapiens
gaccaaagtggacttcg

SEQ ID NO: 10178 - DNA, 17 bp, Homo sapiens
accaaagtggacttcga

SEQ ID NO: 10179 - DNA, 17 bp, Homo sapiens
ccaaagtggacttcgat

SEQ ID NO: 10180 - DNA, 17 bp, Homo sapiens
caaagtggacttcgatg

SEQ ID NO: 10181 - DNA, 17 bp, Homo sapiens
aaagtggacttcgatga

SEQ ID NO: 10182 - DNA, 17 bp, Homo sapiens
aagtggacttcgatgac

SEQ ID NO: 10183 - DNA, 17 bp, Homo sapiens
agtggacttcgatgact

SEQ ID NO: 10184 - DNA, 17 bp, Homo sapiens
gtggacttcgatgactt

SEQ ID NO: 10185 - DNA, 17 bp, Homo sapiens
tggacttcgatgacttc

SEQ ID NO: 10186 - DNA, 17 bp, Homo sapiens
ggacttcgatgacttcc

SEQ ID NO: 10187 - DNA, 17 bp, Homo sapiens
gacttcgatgacttcct

SEQ ID NO: 10188 - DNA, 17 bp, Homo sapiens
acttcgatgacttcctc

SEQ ID NO: 10189 - DNA, 17 bp, Homo sapiens
cttcgatgacttcctcc

SEQ ID NO: 10190 - DNA, 17 bp, Homo sapiens
ttcgatgacttcctccc

SEQ ID NO: 10191 - DNA, 17 bp, Homo sapiens
tcgatgacttcctccca

SEQ ID NO: 10192 - DNA, 17 bp, Homo sapiens
cgatgacttcctcccag

SEQ ID NO: 10193 - DNA, 17 bp, Homo sapiens
gatgacttcctcccagc

SEQ ID NO: 10194 - DNA, 17 bp, Homo sapiens
atgacttcctcccagct

SEQ ID NO: 10195 - DNA, 17 bp, Homo sapiens
tgacttcctcccagcta

SEQ ID NO: 10196 - DNA, 17 bp, Homo sapiens
gacttcctcccagctat

SEQ ID NO: 10197 - DNA, 17 bp, Homo sapiens
acttcctcccagctatc

SEQ ID NO: 10198 - DNA, 17 bp, Homo sapiens
cttcctcccagctatcc

SEQ ID NO: 10199 - DNA, 17 bp, Homo sapiens
ttcctcccagctatccg

SEQ ID NO: 10200 - DNA, 17 bp, Homo sapiens
tcctcccagctatccgg

SEQ ID NO: 10201 - DNA, 17 bp, Homo sapiens
cctcccagctatccgga

SEQ ID NO: 10202 - DNA, 17 bp, Homo sapiens
ctcccagctatccggaa

SEQ ID NO: 10203 - DNA, 17 bp, Homo sapiens
tcccagctatccggaag

SEQ ID NO: 10204 - DNA, 17 bp, Homo sapiens
cccagctatccggaagc

SEQ ID NO: 10205 - DNA, 17 bp, Homo sapiens
ccagctatccggaagcc

SEQ ID NO: 10206 - DNA, 17 bp, Homo sapiens
cagctatccggaagccc

SEQ ID NO: 10207 - DNA, 17 bp, Homo sapiens
agctatccggaagcccc

SEQ ID NO: 10208 - DNA, 17 bp, Homo sapiens
gctatccggaagcccca

SEQ ID NO: 10209 - DNA, 17 bp, Homo sapiens
ctatccggaagccccag

SEQ ID NO: 10210 - DNA, 17 bp, Homo sapiens
tatccggaagccccaga

SEQ ID NO: 10211 - DNA, 17 bp, Homo sapiens
atccggaagccccagac

SEQ ID NO: 10212 - DNA, 17 bp, Homo sapiens
tccggaagccccagaca

SEQ ID NO: 10213 - DNA, 17 bp, Homo sapiens
ccggaagccccagacac

SEQ ID NO: 10214 - DNA, 17 bp, Homo sapiens
cggaagccccagacacc

SEQ ID NO: 10215 - DNA, 17 bp, Homo sapiens
ggaagccccagacacct

SEQ ID NO: 10216 - DNA, 17 bp, Homo sapiens
gaagccccagacaccta

SEQ ID NO: 10217 - DNA, 17 bp, Homo sapiens
aagccccagacacctac

SEQ ID NO: 10218 - DNA, 17 bp, Homo sapiens
agccccagacacctacc

SEQ ID NO: 10219 - DNA, 17 bp, Homo sapiens
gccccagacacctacct

SEQ ID NO: 10220 - DNA, 17 bp, Homo sapiens
ccccagacacctacctc

SEQ ID NO: 10221 - DNA, 17 bp, Homo sapiens
cccagacacctacctcc

SEQ ID NO: 10222 - DNA, 17 bp, Homo sapiens
ccagacacctacctcct

SEQ ID NO: 10223 - DNA, 17 bp, Homo sapiens
cagacacctacctcctt

SEQ ID NO: 10224 - DNA, 17 bp, Homo sapiens
agacacctacctccttg

SEQ ID NO: 10225 - DNA, 17 bp, Homo sapiens
gacacctacctccttgg

SEQ ID NO: 10226 - DNA, 17 bp, Homo sapiens
acacctacctccttggc

SEQ ID NO: 10227 - DNA, 17 bp, Homo sapiens
cacctacctccttggct

SEQ ID NO: 10228 - DNA, 17 bp, Homo sapiens
acctacctccttggctg

SEQ ID NO: 10229 - DNA, 17 bp, Homo sapiens
cctacctccttggctgg

SEQ ID NO: 10230 - DNA, 17 bp, Homo sapiens
ctacctccttggctgga

SEQ ID NO: 10231 - DNA, 17 bp, Homo sapiens
tacctccttggctggat

SEQ ID NO: 10232 - DNA, 17 bp, Homo sapiens
acctccttggctggatc

SEQ ID NO: 10233 - DNA, 17 bp, Homo sapiens
cctccttggctggatca

SEQ ID NO: 10234 - DNA, 17 bp, Homo sapiens
ctccttggctggatcag

SEQ ID NO: 10235 - DNA, 17 bp, Homo sapiens
tccttggctggatcagc

SEQ ID NO: 10236 - DNA, 17 bp, Homo sapiens
ccttggctggatcagcc

SEQ ID NO: 10237 - DNA, 17 bp, Homo sapiens
cttggctggatcagcca

SEQ ID NO: 10238 - DNA, 17 bp, Homo sapiens
ttggctggatcagccaa

SEQ ID NO: 10239 - DNA, 17 bp, Homo sapiens
tggctggatcagccaaa

SEQ ID NO: 10240 - DNA, 17 bp, Homo sapiens
ggctggatcagccaaag

SEQ ID NO: 10241 - DNA, 17 bp, Homo sapiens
gctggatcagccaaagg

SEQ ID NO: 10242 - DNA, 17 bp, Homo sapiens
ctggatcagccaaaggt

SEQ ID NO: 10243 - DNA, 17 bp, Homo sapiens
tggatcagccaaaggtg

SEQ ID NO: 10244 - DNA, 17 bp, Homo sapiens
ggatcagccaaaggtgg

SEQ ID NO: 10245 - DNA, 17 bp, Homo sapiens
gatcagccaaaggtggg

SEQ ID NO: 10246 - DNA, 17 bp, Homo sapiens
atcagccaaaggtgggc

SEQ ID NO: 10247 - DNA, 17 bp, Homo sapiens
tcagccaaaggtgggca

SEQ ID NO: 10248 - DNA, 17 bp, Homo sapiens
cagccaaaggtgggcaa

SEQ ID NO: 10249 - DNA, 17 bp, Homo sapiens
agccaaaggtgggcaag

SEQ ID NO: 10250 - DNA, 17 bp, Homo sapiens
gccaaaggtgggcaaga

SEQ ID NO: 10251 - DNA, 17 bp, Homo sapiens
ccaaaggtgggcaagac

SEQ ID NO: 10252 - DNA, 17 bp, Homo sapiens
caaaggtgggcaagacg

SEQ ID NO: 10253 - DNA, 17 bp, Homo sapiens
aaaggtgggcaagacgg

SEQ ID NO: 10254 - DNA, 17 bp, Homo sapiens
aaggtgggcaagacggt

SEQ ID NO: 10255 - DNA, 17 bp, Homo sapiens
aggtgggcaagacggtt

SEQ ID NO: 10256 - DNA, 17 bp, Homo sapiens
ggtgggcaagacggttc

SEQ ID NO: 10257 - DNA, 17 bp, Homo sapiens
gtgggcaagacggttca

SEQ ID NO: 10258 - DNA, 17 bp, Homo sapiens
tgggcaagacggttcac

SEQ ID NO: 10259 - DNA, 17 bp, Homo sapiens
gggcaagacggttcaca

SEQ ID NO: 10260 - DNA, 17 bp, Homo sapiens
ggcaagacggttcacag

SEQ ID NO: 10261 - DNA, 17 bp, Homo sapiens
gcaagacggttcacagc

SEQ ID NO: 10262 - DNA, 17 bp, Homo sapiens
caagacggttcacagcg

SEQ ID NO: 10263 - DNA, 17 bp, Homo sapiens
aagacggttcacagcgt

SEQ ID NO: 10264 - DNA, 17 bp, Homo sapiens
agacggttcacagcgtt

SEQ ID NO: 10265 - DNA, 17 bp, Homo sapiens
gacggttcacagcgttc

SEQ ID NO: 10266 - DNA, 17 bp, Homo sapiens
acggttcacagcgttca

SEQ ID NO: 10267 - DNA, 17 bp, Homo sapiens
cggttcacagcgttcaa

SEQ ID NO: 10268 - DNA, 17 bp, Homo sapiens
ggttcacagcgttcaag

SEQ ID NO: 10269 - DNA, 17 bp, Homo sapiens
gttcacagcgttcaagc

SEQ ID NO: 10270 - DNA, 17 bp, Homo sapiens
ttcacagcgttcaagca

SEQ ID NO: 10271 - DNA, 17 bp, Homo sapiens
tcacagcgttcaagcat

SEQ ID NO: 10272 - DNA, 17 bp, Homo sapiens
cacagcgttcaagcatc

SEQ ID NO: 10273 - DNA, 17 bp, Homo sapiens
acagcgttcaagcatcc

SEQ ID NO: 10274 - DNA, 17 bp, Homo sapiens
cagcgttcaagcatcca

SEQ ID NO: 10275 - DNA, 17 bp, Homo sapiens
agcgttcaagcatccac

SEQ ID NO: 10276 - DNA, 17 bp, Homo sapiens
gcgttcaagcatccact

SEQ ID NO: 10277 - DNA, 17 bp, Homo sapiens
cgttcaagcatccactt

SEQ ID NO: 10278 - DNA, 17 bp, Homo sapiens
gttcaagcatccacttt

SEQ ID NO: 10279 - DNA, 17 bp, Homo sapiens
ttcaagcatccactttg

SEQ ID NO: 10280 - DNA, 17 bp, Homo sapiens
tcaagcatccactttga

SEQ ID NO: 10281 - DNA, 17 bp, Homo sapiens
caagcatccactttgaa

SEQ ID NO: 10282 - DNA, 17 bp, Homo sapiens
aagcatccactttgaaa

SEQ ID NO: 10283 - DNA, 17 bp, Homo sapiens
agcatccactttgaaac

SEQ ID NO: 10284 - DNA, 17 bp, Homo sapiens
gcatccactttgaaacg

SEQ ID NO: 10285 - DNA, 17 bp, Homo sapiens
catccactttgaaacgg

SEQ ID NO: 10286 - DNA, 17 bp, Homo sapiens
atccactttgaaacgga

SEQ ID NO: 10287 - DNA, 17 bp, Homo sapiens
tccactttgaaacggaa

SEQ ID NO: 10288 - DNA, 17 bp, Homo sapiens
ccactttgaaacggaag

SEQ ID NO: 10289 - DNA, 17 bp, Homo sapiens
cactttgaaacggaaga

SEQ ID NO: 10290 - DNA, 17 bp, Homo sapiens
actttgaaacggaagag

SEQ ID NO: 10291 - DNA, 17 bp, Homo sapiens
ctttgaaacggaagagg

SEQ ID NO: 10292 - DNA, 17 bp, Homo sapiens
tttgaaacggaagaggc

SEQ ID NO: 10293 - DNA, 17 bp, Homo sapiens
ttgaaacggaagaggct

SEQ ID NO: 10294 - DNA, 17 bp, Homo sapiens
tgaaacggaagaggcta

SEQ ID NO: 10295 - DNA, 17 bp, Homo sapiens
gaaacggaagaggctaa

SEQ ID NO: 10296 - DNA, 17 bp, Homo sapiens
aaacggaagaggctaac

SEQ ID NO: 10297 - DNA, 17 bp, Homo sapiens
aacggaagaggctaacc

SEQ ID NO: 10298 - DNA, 17 bp, Homo sapiens
acggaagaggctaaccg

SEQ ID NO: 10299 - DNA, 17 bp, Homo sapiens
cggaagaggctaaccgt

SEQ ID NO: 10300 - DNA, 17 bp, Homo sapiens
ggaagaggctaaccgtt

SEQ ID NO: 10301 - DNA, 17 bp, Homo sapiens
gaagaggctaaccgttc

SEQ ID NO: 10302 - DNA, 17 bp, Homo sapiens
aagaggctaaccgttcc

SEQ ID NO: 10303 - DNA, 17 bp, Homo sapiens
agaggctaaccgttcct

SEQ ID NO: 10304 - DNA, 17 bp, Homo sapiens
gaggctaaccgttcctt

SEQ ID NO: 10305 - DNA, 17 bp, Homo sapiens
aggctaaccgttccttt

SEQ ID NO: 10306 - DNA, 17 bp, Homo sapiens
ggctaaccgttcctttc

SEQ ID NO: 10307 - DNA, 17 bp, Homo sapiens
gctaaccgttcctttct

SEQ ID NO: 10308 - DNA, 17 bp, Homo sapiens
ctaaccgttcctttctc

SEQ ID NO: 10309 - DNA, 17 bp, Homo sapiens
taaccgttcctttctct

SEQ ID NO: 10310 - DNA, 17 bp, Homo sapiens
aaccgttcctttctctc

SEQ ID NO: 10311 - DNA, 17 bp, Homo sapiens
accgttcctttctctcg

SEQ ID NO: 10312 - DNA, 17 bp, Homo sapiens
ccgttcctttctctcgg

SEQ ID NO: 10313 - DNA, 17 bp, Homo sapiens
cgttcctttctctcggg

SEQ ID NO: 10314 - DNA, 17 bp, Homo sapiens
gttcctttctctcgggg

SEQ ID NO: 10315 - DNA, 17 bp, Homo sapiens
ttcctttctctcgggga

SEQ ID NO: 10316 - DNA, 17 bp, Homo sapiens
tcctttctctcggggat

SEQ ID NO: 10317 - DNA, 17 bp, Homo sapiens
cctttctctcggggatc

SEQ ID NO: 10318 - DNA, 17 bp, Homo sapiens
ctttctctcggggatca

SEQ ID NO: 10319 - DNA, 17 bp, Homo sapiens
tttctctcggggatcaa

SEQ ID NO: 10320 - DNA, 17 bp, Homo sapiens
ttctctcggggatcaag

SEQ ID NO: 10321 - DNA, 17 bp, Homo sapiens
tctctcggggatcaaga

SEQ ID NO: 10322 - DNA, 17 bp, Homo sapiens
ctctcggggatcaagac

SEQ ID NO: 10323 - DNA, 17 bp, Homo sapiens
tctcggggatcaagacc

SEQ ID NO: 10324 - DNA, 17 bp, Homo sapiens
ctcggggatcaagacca

SEQ ID NO: 10325 - DNA, 17 bp, Homo sapiens
tcggggatcaagaccat

SEQ ID NO: 10326 - DNA, 17 bp, Homo sapiens
cggggatcaagaccatt

SEQ ID NO: 10327 - DNA, 17 bp, Homo sapiens
ggggatcaagaccattt

SEQ ID NO: 10328 - DNA, 17 bp, Homo sapiens
gggatcaagaccatttt

SEQ ID NO: 10329 - DNA, 17 bp, Homo sapiens
ggatcaagaccattttg

SEQ ID NO: 10330 - DNA, 17 bp, Homo sapiens
gatcaagaccattttga

SEQ ID NO: 10331 - DNA, 17 bp, Homo sapiens
atcaagaccattttgaa

SEQ ID NO: 10332 - DNA, 17 bp, Homo sapiens
tcaagaccattttgaag

SEQ ID NO: 10333 - DNA, 17 bp, Homo sapiens
caagaccattttgaaga

SEQ ID NO: 10334 - DNA, 17 bp, Homo sapiens
aagaccattttgaagaa

SEQ ID NO: 10335 - DNA, 17 bp, Homo sapiens
agaccattttgaagaag

SEQ ID NO: 10336 - DNA, 17 bp, Homo sapiens
gaccattttgaagaaga

SEQ ID NO: 10337 - DNA, 17 bp, Homo sapiens
accattttgaagaagag

SEQ ID NO: 10338 - DNA, 17 bp, Homo sapiens
ccattttgaagaagagc

SEQ ID NO: 10339 - DNA, 17 bp, Homo sapiens
cattttgaagaagagcc

SEQ ID NO: 10340 - DNA, 17 bp, Homo sapiens
attttgaagaagagccc

SEQ ID NO: 10341 - DNA, 17 bp, Homo sapiens
ttttgaagaagagcccg

SEQ ID NO: 10342 - DNA, 17 bp, Homo sapiens
tttgaagaagagcccgg

SEQ ID NO: 10343 - DNA, 17 bp, Homo sapiens
ttgaagaagagcccgga

SEQ ID NO: 10344 - DNA, 17 bp, Homo sapiens
tgaagaagagcccggag

SEQ ID NO: 10345 - DNA, 17 bp, Homo sapiens
gaagaagagcccggagc

SEQ ID NO: 10346 - DNA, 17 bp, Homo sapiens
aagaagagcccggagcc

SEQ ID NO: 10347 - DNA, 17 bp, Homo sapiens
agaagagcccggagccc

SEQ ID NO: 10348 - DNA, 17 bp, Homo sapiens
gaagagcccggagccca

SEQ ID NO: 10349 - DNA, 17 bp, Homo sapiens
aagagcccggagcccaa

SEQ ID NO: 10350 - DNA, 17 bp, Homo sapiens
agagcccggagcccaag

SEQ ID NO: 10351 - DNA, 17 bp, Homo sapiens
gagcccggagcccaagg

SEQ ID NO: 10352 - DNA, 17 bp, Homo sapiens
agcccggagcccaagga

SEQ ID NO: 10353 - DNA, 17 bp, Homo sapiens
gcccggagcccaaggag

SEQ ID NO: 10354 - DNA, 17 bp, Homo sapiens
cccggagcccaaggagg

SEQ ID NO: 10355 - DNA, 17 bp, Homo sapiens
ccggagcccaaggagga

SEQ ID NO: 10356 - DNA, 17 bp, Homo sapiens
cggagcccaaggaggat

SEQ ID NO: 10357 - DNA, 17 bp, Homo sapiens
ggagcccaaggaggatc

SEQ ID NO: 10358 - DNA, 17 bp, Homo sapiens
gagcccaaggaggatcc

SEQ ID NO: 10359 - DNA, 17 bp, Homo sapiens
agcccaaggaggatccc

SEQ ID NO: 10360 - DNA, 17 bp, Homo sapiens
gcccaaggaggatcccg

SEQ ID NO: 10361 - DNA, 17 bp, Homo sapiens
cccaaggaggatcccgc

SEQ ID NO: 10362 - DNA, 17 bp, Homo sapiens
ccaaggaggatcccgct

SEQ ID NO: 10363 - DNA, 17 bp, Homo sapiens
caaggaggatcccgctc

SEQ ID NO: 10364 - DNA, 17 bp, Homo sapiens
aaggaggatcccgctca

SEQ ID NO: 10365 - DNA, 17 bp, Homo sapiens
aggaggatcccgctcac

SEQ ID NO: 10366 - DNA, 17 bp, Homo sapiens
ggaggatcccgctcacc

SEQ ID NO: 10367 - DNA, 17 bp, Homo sapiens
gaggatcccgctcacct

SEQ ID NO: 10368 - DNA, 17 bp, Homo sapiens
aggatcccgctcacctg

SEQ ID NO: 10369 - DNA, 17 bp, Homo sapiens
ggatcccgctcacctgt

SEQ ID NO: 10370 - DNA, 17 bp, Homo sapiens
gatcccgctcacctgtc

SEQ ID NO: 10371 - DNA, 17 bp, Homo sapiens
atcccgctcacctgtct

SEQ ID NO: 10372 - DNA, 17 bp, Homo sapiens
tcccgctcacctgtctg

SEQ ID NO: 10373 - DNA, 17 bp, Homo sapiens
cccgctcacctgtctga

SEQ ID NO: 10374 - DNA, 17 bp, Homo sapiens
ccgctcacctgtctgac

SEQ ID NO: 10375 - DNA, 17 bp, Homo sapiens
cgctcacctgtctgact

SEQ ID NO: 10376 - DNA, 17 bp, Homo sapiens
gctcacctgtctgactc

SEQ ID NO: 10377 - DNA, 17 bp, Homo sapiens
ctcacctgtctgactcg

SEQ ID NO: 10378 - DNA, 17 bp, Homo sapiens
tcacctgtctgactcgt

SEQ ID NO: 10379 - DNA, 17 bp, Homo sapiens
cacctgtctgactcgtc

SEQ ID NO: 10380 - DNA, 17 bp, Homo sapiens
acctgtctgactcgtcc

SEQ ID NO: 10381 - DNA, 17 bp, Homo sapiens
cctgtctgactcgtcct

SEQ ID NO: 10382 - DNA, 17 bp, Homo sapiens
ctgtctgactcgtcctc

SEQ ID NO: 10383 - DNA, 17 bp, Homo sapiens
tgtctgactcgtcctca

SEQ ID NO: 10384 - DNA, 17 bp, Homo sapiens
gtctgactcgtcctcat

SEQ ID NO: 10385 - DNA, 17 bp, Homo sapiens
tctgactcgtcctcatc

SEQ ID NO: 10386 - DNA, 17 bp, Homo sapiens
ctgactcgtcctcatcc

SEQ ID NO: 10387 - DNA, 17 bp, Homo sapiens
tgactcgtcctcatcct

SEQ ID NO: 10388 - DNA, 17 bp, Homo sapiens
gactcgtcctcatcctc

SEQ ID NO: 10389 - DNA, 17 bp, Homo sapiens
actcgtcctcatcctcc

SEQ ID NO: 10390 - DNA, 17 bp, Homo sapiens
ctcgtcctcatcctccg

SEQ ID NO: 10391 - DNA, 17 bp, Homo sapiens
tcgtcctcatcctccgg

SEQ ID NO: 10392 - DNA, 17 bp, Homo sapiens
cgtcctcatcctccggc

SEQ ID NO: 10393 - DNA, 17 bp, Homo sapiens
gtcctcatcctccggct

SEQ ID NO: 10394 - DNA, 17 bp, Homo sapiens
tcctcatcctccggctc

SEQ ID NO: 10395 - DNA, 17 bp, Homo sapiens
cctcatcctccggctcc

SEQ ID NO: 10396 - DNA, 17 bp, Homo sapiens
ctcatcctccggctcca

SEQ ID NO: 10397 - DNA, 17 bp, Homo sapiens
tcatcctccggctccat

SEQ ID NO: 10398 - DNA, 17 bp, Homo sapiens
catcctccggctccatc

SEQ ID NO: 10399 - DNA, 17 bp, Homo sapiens
atcctccggctccatcg

SEQ ID NO: 10400 - DNA, 17 bp, Homo sapiens
tcctccggctccatcgt

SEQ ID NO: 10401 - DNA, 17 bp, Homo sapiens
cctccggctccatcgtg

SEQ ID NO: 10402 - DNA, 17 bp, Homo sapiens
ctccggctccatcgtgt

SEQ ID NO: 10403 - DNA, 17 bp, Homo sapiens
tccggctccatcgtgtc

SEQ ID NO: 10404 - DNA, 17 bp, Homo sapiens
ccggctccatcgtgtcc

SEQ ID NO: 10405 - DNA, 17 bp, Homo sapiens
cggctccatcgtgtcct

SEQ ID NO: 10406 - DNA, 17 bp, Homo sapiens
ggctccatcgtgtcctt

SEQ ID NO: 10407 - DNA, 17 bp, Homo sapiens
gctccatcgtgtccttc

SEQ ID NO: 10408 - DNA, 17 bp, Homo sapiens
ctccatcgtgtccttca

SEQ ID NO: 10409 - DNA, 17 bp, Homo sapiens
tccatcgtgtccttcaa

SEQ ID NO: 10410 - DNA, 17 bp, Homo sapiens
ccatcgtgtccttcaaa

SEQ ID NO: 10411 - DNA, 17 bp, Homo sapiens
catcgtgtccttcaaaa

SEQ ID NO: 10412 - DNA, 17 bp, Homo sapiens
atcgtgtccttcaaaag

SEQ ID NO: 10413 - DNA, 17 bp, Homo sapiens
tcgtgtccttcaaaagt

SEQ ID NO: 10414 - DNA, 17 bp, Homo sapiens
cgtgtccttcaaaagtg

SEQ ID NO: 10415 - DNA, 17 bp, Homo sapiens
gtgtccttcaaaagtgc

SEQ ID NO: 10416 - DNA, 17 bp, Homo sapiens
tgtccttcaaaagtgct

SEQ ID NO: 10417 - DNA, 17 bp, Homo sapiens
gtccttcaaaagtgctg

SEQ ID NO: 10418 - DNA, 17 bp, Homo sapiens
tccttcaaaagtgctga

SEQ ID NO: 10419 - DNA, 17 bp, Homo sapiens
ccttcaaaagtgctgac

SEQ ID NO: 10420 - DNA, 17 bp, Homo sapiens
cttcaaaagtgctgaca

SEQ ID NO: 10421 - DNA, 17 bp, Homo sapiens
ttcaaaagtgctgacag

SEQ ID NO: 10422 - DNA, 17 bp, Homo sapiens
tcaaaagtgctgacagc

SEQ ID NO: 10423 - DNA, 17 bp, Homo sapiens
caaaagtgctgacagca

SEQ ID NO: 10424 - DNA, 17 bp, Homo sapiens
aaaagtgctgacagcat

SEQ ID NO: 10425 - DNA, 17 bp, Homo sapiens
aaagtgctgacagcatc

SEQ ID NO: 10426 - DNA, 17 bp, Homo sapiens
aagtgctgacagcatca

SEQ ID NO: 10427 - DNA, 17 bp, Homo sapiens
agtgctgacagcatcaa

SEQ ID NO: 10428 - DNA, 17 bp, Homo sapiens
gtgctgacagcatcaaa

SEQ ID NO: 10429 - DNA, 17 bp, Homo sapiens
tgctgacagcatcaaaa

SEQ ID NO: 10430 - DNA, 17 bp, Homo sapiens
gctgacagcatcaaaag

SEQ ID NO: 10431 - DNA, 17 bp, Homo sapiens
ctgacagcatcaaaagt

SEQ ID NO: 10432 - DNA, 17 bp, Homo sapiens
tgacagcatcaaaagtc

SEQ ID NO: 10433 - DNA, 17 bp, Homo sapiens
gacagcatcaaaagtcg

SEQ ID NO: 10434 - DNA, 17 bp, Homo sapiens
acagcatcaaaagtcga

SEQ ID NO: 10435 - DNA, 17 bp, Homo sapiens
cagcatcaaaagtcgac

SEQ ID NO: 10436 - DNA, 17 bp, Homo sapiens
agcatcaaaagtcgacc

SEQ ID NO: 10437 - DNA, 17 bp, Homo sapiens
gcatcaaaagtcgacca

SEQ ID NO: 10438 - DNA, 17 bp, Homo sapiens
catcaaaagtcgaccag

SEQ ID NO: 10439 - DNA, 17 bp, Homo sapiens
atcaaaagtcgaccagg

SEQ ID NO: 10440 - DNA, 17 bp, Homo sapiens
tcaaaagtcgaccagga

SEQ ID NO: 10441 - DNA, 17 bp, Homo sapiens
caaaagtcgaccaggaa

SEQ ID NO: 10442 - DNA, 17 bp, Homo sapiens
aaaagtcgaccaggaat

SEQ ID NO: 10443 - DNA, 17 bp, Homo sapiens
aaagtcgaccaggaatc

SEQ ID NO: 10444 - DNA, 17 bp, Homo sapiens
aagtcgaccaggaatcc

SEQ ID NO: 10445 - DNA, 17 bp, Homo sapiens
agtcgaccaggaatccc

SEQ ID NO: 10446 - DNA, 17 bp, Homo sapiens
gtcgaccaggaatccca

SEQ ID NO: 10447 - DNA, 17 bp, Homo sapiens
tcgaccaggaatcccac

SEQ ID NO: 10448 - DNA, 17 bp, Homo sapiens
cgaccaggaatcccacg

SEQ ID NO: 10449 - DNA, 17 bp, Homo sapiens
gaccaggaatcccacga

SEQ ID NO: 10450 - DNA, 17 bp, Homo sapiens
accaggaatcccacgac

SEQ ID NO: 10451 - DNA, 17 bp, Homo sapiens
ccaggaatcccacgact

SEQ ID NO: 10452 - DNA, 17 bp, Homo sapiens
caggaatcccacgactt

SEQ ID NO: 10453 - DNA, 17 bp, Homo sapiens
aggaatcccacgacttg

SEQ ID NO: 10454 - DNA, 17 bp, Homo sapiens
ggaatcccacgacttgc

SEQ ID NO: 10455 - DNA, 17 bp, Homo sapiens
gaatcccacgacttgcg

SEQ ID NO: 10456 - DNA, 17 bp, Homo sapiens
aatcccacgacttgcgg

SEQ ID NO: 10457 - DNA, 17 bp, Homo sapiens
atcccacgacttgcggg

SEQ ID NO: 10458 - DNA, 17 bp, Homo sapiens
tcccacgacttgcgggt

SEQ ID NO: 10459 - DNA, 17 bp, Homo sapiens
cccacgacttgcgggtg

SEQ ID NO: 10460 - DNA, 17 bp, Homo sapiens
ccacgacttgcgggtga

SEQ ID NO: 10461 - DNA, 17 bp, Homo sapiens
cacgacttgcgggtgac

SEQ ID NO: 10462 - DNA, 17 bp, Homo sapiens
acgacttgcgggtgacg

SEQ ID NO: 10463 - DNA, 17 bp, Homo sapiens
cgacttgcgggtgacgg

SEQ ID NO: 10464 - DNA, 17 bp, Homo sapiens
gacttgcgggtgacggt

SEQ ID NO: 10465 - DNA, 17 bp, Homo sapiens
acttgcgggtgacggtg

SEQ ID NO: 10466 - DNA, 17 bp, Homo sapiens
cttgcgggtgacggtgg

SEQ ID NO: 10467 - DNA, 17 bp, Homo sapiens
ttgcgggtgacggtggc

SEQ ID NO: 10468 - DNA, 17 bp, Homo sapiens
tgcgggtgacggtggcg

SEQ ID NO: 10469 - DNA, 17 bp, Homo sapiens
gcgggtgacggtggcga

SEQ ID NO: 10470 - DNA, 17 bp, Homo sapiens
cgggtgacggtggcgag

SEQ ID NO: 10471 - DNA, 17 bp, Homo sapiens
gggtgacggtggcgagc

SEQ ID NO: 10472 - DNA, 17 bp, Homo sapiens
ggtgacggtggcgagcg

SEQ ID NO: 10473 - DNA, 17 bp, Homo sapiens
gtgacggtggcgagcga

SEQ ID NO: 10474 - DNA, 17 bp, Homo sapiens
tgacggtggcgagcgaa

SEQ ID NO: 10475 - DNA, 17 bp, Homo sapiens
gacggtggcgagcgaac

SEQ ID NO: 10476 - DNA, 17 bp, Homo sapiens
acggtggcgagcgaacg

SEQ ID NO: 10477 - DNA, 17 bp, Homo sapiens
cggtggcgagcgaacgt

SEQ ID NO: 10478 - DNA, 17 bp, Homo sapiens
ggtggcgagcgaacgtc

SEQ ID NO: 10479 - DNA, 17 bp, Homo sapiens
gtggcgagcgaacgtcc

SEQ ID NO: 10480 - DNA, 17 bp, Homo sapiens
tggcgagcgaacgtccc

SEQ ID NO: 10481 - DNA, 17 bp, Homo sapiens
ggcgagcgaacgtcccc

SEQ ID NO: 10482 - DNA, 17 bp, Homo sapiens
gcgagcgaacgtccccc

SEQ ID NO: 10483 - DNA, 17 bp, Homo sapiens
cgagcgaacgtcccccg

SEQ ID NO: 10484 - DNA, 17 bp, Homo sapiens
gagcgaacgtcccccga

SEQ ID NO: 10485 - DNA, 17 bp, Homo sapiens
agcgaacgtcccccgag

SEQ ID NO: 10486 - DNA, 17 bp, Homo sapiens
gcgaacgtcccccgagc

SEQ ID NO: 10487 - DNA, 17 bp, Homo sapiens
cgaacgtcccccgagcg

SEQ ID NO: 10488 - DNA, 17 bp, Homo sapiens
gaacgtcccccgagcgg

SEQ ID NO: 10489 - DNA, 17 bp, Homo sapiens
aacgtcccccgagcgga

SEQ ID NO: 10490 - DNA, 17 bp, Homo sapiens
acgtcccccgagcggag

SEQ ID NO: 10491 - DNA, 17 bp, Homo sapiens
cgtcccccgagcggaga

SEQ ID NO: 10492 - DNA, 17 bp, Homo sapiens
gtcccccgagcggagag

SEQ ID NO: 10493 - DNA, 17 bp, Homo sapiens
tcccccgagcggagaga

SEQ ID NO: 10494 - DNA, 17 bp, Homo sapiens
cccccgagcggagagag

SEQ ID NO: 10495 - DNA, 17 bp, Homo sapiens
ccccgagcggagagagc

SEQ ID NO: 10496 - DNA, 17 bp, Homo sapiens
cccgagcggagagagcc

SEQ ID NO: 10497 - DNA, 17 bp, Homo sapiens
ccgagcggagagagcca

SEQ ID NO: 10498 - DNA, 17 bp, Homo sapiens
cgagcggagagagccag

SEQ ID NO: 10499 - DNA, 17 bp, Homo sapiens
gagcggagagagccagg

SEQ ID NO: 10500 - DNA, 17 bp, Homo sapiens
agcggagagagccaggg

SEQ ID NO: 10501 - DNA, 17 bp, Homo sapiens
gcggagagagccaggga

SEQ ID NO: 10502 - DNA, 17 bp, Homo sapiens
cggagagagccagggac

SEQ ID NO: 10503 - DNA, 17 bp, Homo sapiens
ggagagagccagggacg

SEQ ID NO: 10504 - DNA, 17 bp, Homo sapiens
gagagagccagggacgg

SEQ ID NO: 10505 - DNA, 17 bp, Homo sapiens
agagagccagggacggg

SEQ ID NO: 10506 - DNA, 17 bp, Homo sapiens
gagagccagggacgggg

SEQ ID NO: 10507 - DNA, 17 bp, Homo sapiens
agagccagggacgggga

SEQ ID NO: 10508 - DNA, 17 bp, Homo sapiens
gagccagggacggggag

SEQ ID NO: 10509 - DNA, 17 bp, Homo sapiens
agccagggacggggagg

SEQ ID NO: 10510 - DNA, 17 bp, Homo sapiens
gccagggacggggagga

SEQ ID NO: 10511 - DNA, 17 bp, Homo sapiens
ccagggacggggaggaa

SEQ ID NO: 10512 - DNA, 17 bp, Homo sapiens
cagggacggggaggaaa

SEQ ID NO: 10513 - DNA, 17 bp, Homo sapiens
agggacggggaggaaag

SEQ ID NO: 10514 - DNA, 17 bp, Homo sapiens
gggacggggaggaaaga

SEQ ID NO: 10515 - DNA, 17 bp, Homo sapiens
ggacggggaggaaagac

SEQ ID NO: 10516 - DNA, 17 bp, Homo sapiens
gacggggaggaaagacg

SEQ ID NO: 10517 - DNA, 17 bp, Homo sapiens
acggggaggaaagacga

SEQ ID NO: 10518 - DNA, 17 bp, Homo sapiens
cggggaggaaagacgac

SEQ ID NO: 10519 - DNA, 17 bp, Homo sapiens
ggggaggaaagacgacg

SEQ ID NO: 10520 - DNA, 17 bp, Homo sapiens
gggaggaaagacgacga

SEQ ID NO: 10521 - DNA, 17 bp, Homo sapiens
ggaggaaagacgacgat

SEQ ID NO: 10522 - DNA, 17 bp, Homo sapiens
gaggaaagacgacgatg

SEQ ID NO: 10523 - DNA, 17 bp, Homo sapiens
aggaaagacgacgatgt

SEQ ID NO: 10524 - DNA, 17 bp, Homo sapiens
ggaaagacgacgatgtt

SEQ ID NO: 10525 - DNA, 17 bp, Homo sapiens
gaaagacgacgatgttg

SEQ ID NO: 10526 - DNA, 17 bp, Homo sapiens
aaagacgacgatgttgc

SEQ ID NO: 10527 - DNA, 17 bp, Homo sapiens
aagacgacgatgttgcg

SEQ ID NO: 10528 - DNA, 17 bp, Homo sapiens
agacgacgatgttgcga

SEQ ID NO: 10529 - DNA, 17 bp, Homo sapiens
gacgacgatgttgcgag

SEQ ID NO: 10530 - DNA, 17 bp, Homo sapiens
acgacgatgttgcgagc

SEQ ID NO: 10531 - DNA, 17 bp, Homo sapiens
cgacgatgttgcgagca

SEQ ID NO: 10532 - DNA, 17 bp, Homo sapiens
gacgatgttgcgagcat

SEQ ID NO: 10533 - DNA, 17 bp, Homo sapiens
acgatgttgcgagcata

SEQ ID NO: 10534 - DNA, 17 bp, Homo sapiens
cgatgttgcgagcataa

SEQ ID NO: 10535 - DNA, 17 bp, Homo sapiens
gatgttgcgagcataat

SEQ ID NO: 10536 - DNA, 17 bp, Homo sapiens
atgttgcgagcataatg

SEQ ID NO: 10537 - DNA, 17 bp, Homo sapiens
tgttgcgagcataatga

SEQ ID NO: 10538 - DNA, 17 bp, Homo sapiens
gttgcgagcataatgaa

SEQ ID NO: 10539 - DNA, 17 bp, Homo sapiens
ttgcgagcataatgaag

SEQ ID NO: 10540 - DNA, 17 bp, Homo sapiens
tgcgagcataatgaaga

SEQ ID NO: 10541 - DNA, 17 bp, Homo sapiens
gcgagcataatgaagaa

SEQ ID NO: 10542 - DNA, 17 bp, Homo sapiens
cgagcataatgaagaaa

SEQ ID NO: 10543 - DNA, 17 bp, Homo sapiens
gagcataatgaagaaat

SEQ ID NO: 10544 - DNA, 17 bp, Homo sapiens
agcataatgaagaaata

SEQ ID NO: 10545 - DNA, 17 bp, Homo sapiens
gcataatgaagaaatac

SEQ ID NO: 10546 - DNA, 17 bp, Homo sapiens
cataatgaagaaatacc

SEQ ID NO: 10547 - DNA, 17 bp, Homo sapiens
ataatgaagaaatacct

SEQ ID NO: 10548 - DNA, 17 bp, Homo sapiens
taatgaagaaatacctc

SEQ ID NO: 10549 - DNA, 17 bp, Homo sapiens
aatgaagaaatacctcc

SEQ ID NO: 10550 - DNA, 17 bp, Homo sapiens
atgaagaaatacctcca

SEQ ID NO: 10551 - DNA, 17 bp, Homo sapiens
tgaagaaatacctccag

SEQ ID NO: 10552 - DNA, 17 bp, Homo sapiens
gaagaaatacctccaga

SEQ ID NO: 10553 - DNA, 17 bp, Homo sapiens
aagaaatacctccagaa

SEQ ID NO: 10554 - DNA, 17 bp, Homo sapiens
agaaatacctccagaag

SEQ ID NO: 10555 - DNA, 17 bp, Homo sapiens
gaaatacctccagaagt

SEQ ID NO: 10556 - DNA, 17 bp, Homo sapiens
aaatacctccagaagta

SEQ ID NO: 10557 - DNA, 17 bp, Homo sapiens
aatacctccagaagtag

SEQ ID NO: 10558 - DNA, 17 bp, Homo sapiens
atacctccagaagtagg

SEQ ID NO: 10559 - DNA, 17 bp, Homo sapiens
tacctccagaagtagga

SEQ ID NO: 10560 - DNA, 17 bp, Homo sapiens
acctccagaagtaggaa

SEQ ID NO: 10561 - DNA, 17 bp, Homo sapiens
cctccagaagtaggaac

SEQ ID NO: 10562 - DNA, 17 bp, Homo sapiens
ctccagaagtaggaacc

SEQ ID NO: 10563 - DNA, 17 bp, Homo sapiens
tccagaagtaggaacca

SEQ ID NO: 10564 - DNA, 17 bp, Homo sapiens
ccagaagtaggaaccag

SEQ ID NO: 10565 - DNA, 17 bp, Homo sapiens
cagaagtaggaaccagt

SEQ ID NO: 10566 - DNA, 17 bp, Homo sapiens
agaagtaggaaccagtt

SEQ ID NO: 10567 - DNA, 17 bp, Homo sapiens
gaagtaggaaccagttc

SEQ ID NO: 10568 - DNA, 17 bp, Homo sapiens
aagtaggaaccagttca

SEQ ID NO: 10569 - DNA, 17 bp, Homo sapiens
agtaggaaccagttcag

SEQ ID NO: 10570 - DNA, 17 bp, Homo sapiens
gtaggaaccagttcagc

SEQ ID NO: 10571 - DNA, 17 bp, Homo sapiens
taggaaccagttcagcc

SEQ ID NO: 10572 - DNA, 17 bp, Homo sapiens
aggaaccagttcagcct

SEQ ID NO: 10573 - DNA, 17 bp, Homo sapiens
ggaaccagttcagcctc

SEQ ID NO: 10574 - DNA, 17 bp, Homo sapiens
gaaccagttcagcctcc

SEQ ID NO: 10575 - DNA, 17 bp, Homo sapiens
aaccagttcagcctcct

SEQ ID NO: 10576 - DNA, 17 bp, Homo sapiens
accagttcagcctcctt

SEQ ID NO: 10577 - DNA, 17 bp, Homo sapiens
ccagttcagcctccttg

SEQ ID NO: 10578 - DNA, 17 bp, Homo sapiens
cagttcagcctccttga

SEQ ID NO: 10579 - DNA, 17 bp, Homo sapiens
agttcagcctccttgaa

SEQ ID NO: 10580 - DNA, 17 bp, Homo sapiens
gttcagcctccttgaag

SEQ ID NO: 10581 - DNA, 17 bp, Homo sapiens
ttcagcctccttgaagc

SEQ ID NO: 10582 - DNA, 17 bp, Homo sapiens
tcagcctccttgaagct

SEQ ID NO: 10583 - DNA, 17 bp, Homo sapiens
cagcctccttgaagctg

SEQ ID NO: 10584 - DNA, 17 bp, Homo sapiens
agcctccttgaagctgc

SEQ ID NO: 10585 - DNA, 17 bp, Homo sapiens
gcctccttgaagctgcc

SEQ ID NO: 10586 - DNA, 17 bp, Homo sapiens
cctccttgaagctgccc

SEQ ID NO: 10587 - DNA, 17 bp, Homo sapiens
ctccttgaagctgccct

SEQ ID NO: 10588 - DNA, 17 bp, Homo sapiens
tccttgaagctgccctt

SEQ ID NO: 10589 - DNA, 17 bp, Homo sapiens
ccttgaagctgcccttg

SEQ ID NO: 10590 - DNA, 17 bp, Homo sapiens
cttgaagctgcccttga

SEQ ID NO: 10591 - DNA, 17 bp, Homo sapiens
ttgaagctgcccttgaa

SEQ ID NO: 10592 - DNA, 17 bp, Homo sapiens
tgaagctgcccttgaag

SEQ ID NO: 10593 - DNA, 17 bp, Homo sapiens
gaagctgcccttgaaga

SEQ ID NO: 10594 - DNA, 17 bp, Homo sapiens
aagctgcccttgaagac

SEQ ID NO: 10595 - DNA, 17 bp, Homo sapiens
agctgcccttgaagact

SEQ ID NO: 10596 - DNA, 17 bp, Homo sapiens
gctgcccttgaagactt

SEQ ID NO: 10597 - DNA, 17 bp, Homo sapiens
ctgcccttgaagacttc

SEQ ID NO: 10598 - DNA, 17 bp, Homo sapiens
tgcccttgaagacttcc

SEQ ID NO: 10599 - DNA, 17 bp, Homo sapiens
gcccttgaagacttccc

SEQ ID NO: 10600 - DNA, 17 bp, Homo sapiens
cccttgaagacttcccg

SEQ ID NO: 10601 - DNA, 17 bp, Homo sapiens
ccttgaagacttcccga

SEQ ID NO: 10602 - DNA, 17 bp, Homo sapiens
cttgaagacttcccgac

SEQ ID NO: 10603 - DNA, 17 bp, Homo sapiens
ttgaagacttcccgact

SEQ ID NO: 10604 - DNA, 17 bp, Homo sapiens
tgaagacttcccgactc

SEQ ID NO: 10605 - DNA, 17 bp, Homo sapiens
gaagacttcccgactct

SEQ ID NO: 10606 - DNA, 17 bp, Homo sapiens
aagacttcccgactcta

SEQ ID NO: 10607 - DNA, 17 bp, Homo sapiens
agacttcccgactctac

SEQ ID NO: 10608 - DNA, 17 bp, Homo sapiens
gacttcccgactctaca

SEQ ID NO: 10609 - DNA, 17 bp, Homo sapiens
acttcccgactctacaa

SEQ ID NO: 10610 - DNA, 17 bp, Homo sapiens
cttcccgactctacaat

SEQ ID NO: 10611 - DNA, 17 bp, Homo sapiens
ttcccgactctacaata

SEQ ID NO: 10612 - DNA, 17 bp, Homo sapiens
tcccgactctacaataa

SEQ ID NO: 10613 - DNA, 17 bp, Homo sapiens
cccgactctacaataac

SEQ ID NO: 10614 - DNA, 17 bp, Homo sapiens
ccgactctacaataact

SEQ ID NO: 10615 - DNA, 17 bp, Homo sapiens
cgactctacaataactt

SEQ ID NO: 10616 - DNA, 17 bp, Homo sapiens
gactctacaataacttg

SEQ ID NO: 10617 - DNA, 17 bp, Homo sapiens
actctacaataacttgg

SEQ ID NO: 10618 - DNA, 17 bp, Homo sapiens
ctctacaataacttgga

SEQ ID NO: 10619 - DNA, 17 bp, Homo sapiens
tctacaataacttggag

SEQ ID NO: 10620 - DNA, 17 bp, Homo sapiens
ctacaataacttggaga

SEQ ID NO: 10621 - DNA, 17 bp, Homo sapiens
tacaataacttggagac

SEQ ID NO: 10622 - DNA, 17 bp, Homo sapiens
acaataacttggagaca

SEQ ID NO: 10623 - DNA, 17 bp, Homo sapiens
caataacttggagacag

SEQ ID NO: 10624 - DNA, 17 bp, Homo sapiens
aataacttggagacaga

SEQ ID NO: 10625 - DNA, 17 bp, Homo sapiens
ataacttggagacagag

SEQ ID NO: 10626 - DNA, 17 bp, Homo sapiens
taacttggagacagaga

SEQ ID NO: 10627 - DNA, 17 bp, Homo sapiens
aacttggagacagagag

SEQ ID NO: 10628 - DNA, 17 bp, Homo sapiens
acttggagacagagaga

SEQ ID NO: 10629 - DNA, 17 bp, Homo sapiens
cttggagacagagagac

SEQ ID NO: 10630 - DNA, 17 bp, Homo sapiens
ttggagacagagagact

SEQ ID NO: 10631 - DNA, 17 bp, Homo sapiens
tggagacagagagactg

SEQ ID NO: 10632 - DNA, 17 bp, Homo sapiens
ggagacagagagactgg

SEQ ID NO: 10633 - DNA, 17 bp, Homo sapiens
gagacagagagactggc

SEQ ID NO: 10634 - DNA, 17 bp, Homo sapiens
agacagagagactggcc

SEQ ID NO: 10635 - DNA, 17 bp, Homo sapiens
gacagagagactggcca

SEQ ID NO: 10636 - DNA, 17 bp, Homo sapiens
acagagagactggccag

SEQ ID NO: 10637 - DNA, 17 bp, Homo sapiens
cagagagactggccagg

SEQ ID NO: 10638 - DNA, 17 bp, Homo sapiens
agagagactggccaggc

SEQ ID NO: 10639 - DNA, 17 bp, Homo sapiens
gagagactggccaggcc

SEQ ID NO: 10640 - DNA, 17 bp, Homo sapiens
agagactggccaggcct

SEQ ID NO: 10641 - DNA, 17 bp, Homo sapiens
gagactggccaggcctc

SEQ ID NO: 10642 - DNA, 17 bp, Homo sapiens
agactggccaggcctcc

SEQ ID NO: 10643 - DNA, 17 bp, Homo sapiens
gactggccaggcctccc

SEQ ID NO: 10644 - DNA, 17 bp, Homo sapiens
actggccaggcctcccc

SEQ ID NO: 10645 - DNA, 17 bp, Homo sapiens
ctggccaggcctccccg

SEQ ID NO: 10646 - DNA, 17 bp, Homo sapiens
tggccaggcctccccgg

SEQ ID NO: 10647 - DNA, 17 bp, Homo sapiens
ggccaggcctccccggt

SEQ ID NO: 10648 - DNA, 17 bp, Homo sapiens
gccaggcctccccggtg

SEQ ID NO: 10649 - DNA, 17 bp, Homo sapiens
ccaggcctccccggtgg

SEQ ID NO: 10650 - DNA, 17 bp, Homo sapiens
caggcctccccggtggc

SEQ ID NO: 10651 - DNA, 17 bp, Homo sapiens
aggcctccccggtggcc

SEQ ID NO: 10652 - DNA, 17 bp, Homo sapiens
ggcctccccggtggcca

SEQ ID NO: 10653 - DNA, 17 bp, Homo sapiens
gcctccccggtggccag

SEQ ID NO: 10654 - DNA, 17 bp, Homo sapiens
cctccccggtggccaga

SEQ ID NO: 10655 - DNA, 17 bp, Homo sapiens
ctccccggtggccagag

SEQ ID NO: 10656 - DNA, 17 bp, Homo sapiens
tccccggtggccagagc

SEQ ID NO: 10657 - DNA, 17 bp, Homo sapiens
ccccggtggccagagcc

SEQ ID NO: 10658 - DNA, 17 bp, Homo sapiens
cccggtggccagagcca

SEQ ID NO: 10659 - DNA, 17 bp, Homo sapiens
ccggtggccagagccag

SEQ ID NO: 10660 - DNA, 17 bp, Homo sapiens
cggtggccagagccagc

SEQ ID NO: 10661 - DNA, 17 bp, Homo sapiens
ggtggccagagccagcc

SEQ ID NO: 10662 - DNA, 17 bp, Homo sapiens
gtggccagagccagcca

SEQ ID NO: 10663 - DNA, 17 bp, Homo sapiens
tggccagagccagccag

SEQ ID NO: 10664 - DNA, 17 bp, Homo sapiens
ggccagagccagccagc

SEQ ID NO: 10665 - DNA, 17 bp, Homo sapiens
gccagagccagccagca

SEQ ID NO: 10666 - DNA, 17 bp, Homo sapiens
ccagagccagccagcat

SEQ ID NO: 10667 - DNA, 17 bp, Homo sapiens
cagagccagccagcatg

SEQ ID NO: 10668 - DNA, 17 bp, Homo sapiens
agagccagccagcatgg

SEQ ID NO: 10669 - DNA, 17 bp, Homo sapiens
gagccagccagcatggc

SEQ ID NO: 10670 - DNA, 17 bp, Homo sapiens
agccagccagcatggcc

SEQ ID NO: 10671 - DNA, 17 bp, Homo sapiens
gccagccagcatggcca

SEQ ID NO: 10672 - DNA, 17 bp, Homo sapiens
ccagccagcatggccac

SEQ ID NO: 10673 - DNA, 17 bp, Homo sapiens
cagccagcatggccacc

SEQ ID NO: 10674 - DNA, 17 bp, Homo sapiens
agccagcatggccaccc

SEQ ID NO: 10675 - DNA, 17 bp, Homo sapiens
gccagcatggccaccct

SEQ ID NO: 10676 - DNA, 17 bp, Homo sapiens
ccagcatggccaccctc

SEQ ID NO: 10677 - DNA, 17 bp, Homo sapiens
cagcatggccaccctca

SEQ ID NO: 10678 - DNA, 17 bp, Homo sapiens
agcatggccaccctcaa

SEQ ID NO: 10679 - DNA, 17 bp, Homo sapiens
gcatggccaccctcaag

SEQ ID NO: 10680 - DNA, 17 bp, Homo sapiens
catggccaccctcaaga

SEQ ID NO: 10681 - DNA, 17 bp, Homo sapiens
atggccaccctcaagag

SEQ ID NO: 10682 - DNA, 17 bp, Homo sapiens
tggccaccctcaagagg

SEQ ID NO: 10683 - DNA, 17 bp, Homo sapiens
ggccaccctcaagaggc

SEQ ID NO: 10684 - DNA, 17 bp, Homo sapiens
gccaccctcaagaggcg

SEQ ID NO: 10685 - DNA, 17 bp, Homo sapiens
ccaccctcaagaggcga

SEQ ID NO: 10686 - DNA, 17 bp, Homo sapiens
caccctcaagaggcgag

SEQ ID NO: 10687 - DNA, 17 bp, Homo sapiens
accctcaagaggcgaga

SEQ ID NO: 10688 - DNA, 17 bp, Homo sapiens
ccctcaagaggcgagat

SEQ ID NO: 10689 - DNA, 17 bp, Homo sapiens
cctcaagaggcgagatg

SEQ ID NO: 10690 - DNA, 17 bp, Homo sapiens
ctcaagaggcgagatga

SEQ ID NO: 10691 - DNA, 17 bp, Homo sapiens
tcaagaggcgagatgag

SEQ ID NO: 10692 - DNA, 17 bp, Homo sapiens
caagaggcgagatgagc

SEQ ID NO: 10693 - DNA, 17 bp, Homo sapiens
aagaggcgagatgagcc

SEQ ID NO: 10694 - DNA, 17 bp, Homo sapiens
agaggcgagatgagccc

SEQ ID NO: 10695 - DNA, 17 bp, Homo sapiens
gaggcgagatgagccca

SEQ ID NO: 10696 - DNA, 17 bp, Homo sapiens
aggcgagatgagcccac

SEQ ID NO: 10697 - DNA, 17 bp, Homo sapiens
ggcgagatgagcccaca

SEQ ID NO: 10698 - DNA, 17 bp, Homo sapiens
gcgagatgagcccacag

SEQ ID NO: 10699 - DNA, 17 bp, Homo sapiens
cgagatgagcccacaga

SEQ ID NO: 10700 - DNA, 17 bp, Homo sapiens
gagatgagcccacagag

SEQ ID NO: 10701 - DNA, 17 bp, Homo sapiens
agatgagcccacagagg

SEQ ID NO: 10702 - DNA, 17 bp, Homo sapiens
gatgagcccacagaggc

SEQ ID NO: 10703 - DNA, 17 bp, Homo sapiens
atgagcccacagaggca

SEQ ID NO: 10704 - DNA, 17 bp, Homo sapiens
tgagcccacagaggcat

SEQ ID NO: 10705 - DNA, 17 bp, Homo sapiens
gagcccacagaggcata

SEQ ID NO: 10706 - DNA, 17 bp, Homo sapiens
agcccacagaggcatat

SEQ ID NO: 10707 - DNA, 17 bp, Homo sapiens
gcccacagaggcatatc

SEQ ID NO: 10708 - DNA, 17 bp, Homo sapiens
cccacagaggcatatcc

SEQ ID NO: 10709 - DNA, 17 bp, Homo sapiens
ccacagaggcatatcct

SEQ ID NO: 10710 - DNA, 17 bp, Homo sapiens
cacagaggcatatcctg

SEQ ID NO: 10711 - DNA, 17 bp, Homo sapiens
acagaggcatatcctgc

SEQ ID NO: 10712 - DNA, 17 bp, Homo sapiens
cagaggcatatcctgcg

SEQ ID NO: 10713 - DNA, 17 bp, Homo sapiens
agaggcatatcctgcgg

SEQ ID NO: 10714 - DNA, 17 bp, Homo sapiens
gaggcatatcctgcggg

SEQ ID NO: 10715 - DNA, 17 bp, Homo sapiens
aggcatatcctgcgggg

SEQ ID NO: 10716 - DNA, 17 bp, Homo sapiens
ggcatatcctgcgggga

SEQ ID NO: 10717 - DNA, 17 bp, Homo sapiens
gcatatcctgcggggat

SEQ ID NO: 10718 - DNA, 17 bp, Homo sapiens
catatcctgcggggatg

SEQ ID NO: 10719 - DNA, 17 bp, Homo sapiens
atatcctgcggggatgc

SEQ ID NO: 10720 - DNA, 17 bp, Homo sapiens
tatcctgcggggatgct

SEQ ID NO: 10721 - DNA, 17 bp, Homo sapiens
atcctgcggggatgctg

SEQ ID NO: 10722 - DNA, 17 bp, Homo sapiens
tcctgcggggatgctgg

SEQ ID NO: 10723 - DNA, 17 bp, Homo sapiens
cctgcggggatgctggg

SEQ ID NO: 10724 - DNA, 17 bp, Homo sapiens
ctgcggggatgctgggc

SEQ ID NO: 10725 - DNA, 17 bp, Homo sapiens
tgcggggatgctgggct

SEQ ID NO: 10726 - DNA, 17 bp, Homo sapiens
gcggggatgctgggctc

SEQ ID NO: 10727 - DNA, 17 bp, Homo sapiens
cggggatgctgggctcc

SEQ ID NO: 10728 - DNA, 17 bp, Homo sapiens
ggggatgctgggctccc

SEQ ID NO: 10729 - DNA, 17 bp, Homo sapiens
gggatgctgggctccca

SEQ ID NO: 10730 - DNA, 17 bp, Homo sapiens
ggatgctgggctcccag

SEQ ID NO: 10731 - DNA, 17 bp, Homo sapiens
gatgctgggctcccagt

SEQ ID NO: 10732 - DNA, 17 bp, Homo sapiens
atgctgggctcccagtg

SEQ ID NO: 10733 - DNA, 17 bp, Homo sapiens
tgctgggctcccagtgt

SEQ ID NO: 10734 - DNA, 17 bp, Homo sapiens
gctgggctcccagtgtg

SEQ ID NO: 10735 - DNA, 17 bp, Homo sapiens
ctgggctcccagtgtgg

SEQ ID NO: 10736 - DNA, 17 bp, Homo sapiens
tgggctcccagtgtggt

SEQ ID NO: 10737 - DNA, 17 bp, Homo sapiens
gggctcccagtgtggtt

SEQ ID NO: 10738 - DNA, 17 bp, Homo sapiens
ggctcccagtgtggttg

SEQ ID NO: 10739 - DNA, 17 bp, Homo sapiens
gctcccagtgtggttgg

SEQ ID NO: 10740 - DNA, 17 bp, Homo sapiens
ctcccagtgtggttggc

SEQ ID NO: 10741 - DNA, 17 bp, Homo sapiens
tcccagtgtggttggcc

SEQ ID NO: 10742 - DNA, 17 bp, Homo sapiens
cccagtgtggttggcct

SEQ ID NO: 10743 - DNA, 17 bp, Homo sapiens
ccagtgtggttggcctg

SEQ ID NO: 10744 - DNA, 17 bp, Homo sapiens
cagtgtggttggcctga

SEQ ID NO: 10745 - DNA, 17 bp, Homo sapiens
agtgtggttggcctgaa

SEQ ID NO: 10746 - DNA, 17 bp, Homo sapiens
gtgtggttggcctgaac

SEQ ID NO: 10747 - DNA, 17 bp, Homo sapiens
tgtggttggcctgaaca

SEQ ID NO: 10748 - DNA, 17 bp, Homo sapiens
gtggttggcctgaacaa

SEQ ID NO: 10749 - DNA, 17 bp, Homo sapiens
tggttggcctgaacaaa

SEQ ID NO: 10750 - DNA, 17 bp, Homo sapiens
ggttggcctgaacaaaa

SEQ ID NO: 10751 - DNA, 17 bp, Homo sapiens
gttggcctgaacaaaat

SEQ ID NO: 10752 - DNA, 17 bp, Homo sapiens
ttggcctgaacaaaata

SEQ ID NO: 10753 - DNA, 17 bp, Homo sapiens
tggcctgaacaaaataa

SEQ ID NO: 10754 - DNA, 17 bp, Homo sapiens
ggcctgaacaaaataaa

SEQ ID NO: 10755 - DNA, 17 bp, Homo sapiens
gcctgaacaaaataaag

SEQ ID NO: 10756 - DNA, 17 bp, Homo sapiens
cctgaacaaaataaagt

SEQ ID NO: 10757 - DNA, 17 bp, Homo sapiens
ctgaacaaaataaagtg

SEQ ID NO: 10758 - DNA, 17 bp, Homo sapiens
tgaacaaaataaagtgt

SEQ ID NO: 10759 - DNA, 17 bp, Homo sapiens
gaacaaaataaagtgtt

SEQ ID NO: 10760 - DNA, 17 bp, Homo sapiens
aacaaaataaagtgttg

SEQ ID NO: 10761 - DNA, 17 bp, Homo sapiens
acaaaataaagtgttga

SEQ ID NO: 10762 - DNA, 17 bp, Homo sapiens
caaaataaagtgttgac

SEQ ID NO: 10763 - DNA, 17 bp, Homo sapiens
aaaataaagtgttgact

SEQ ID NO: 10764 - DNA, 17 bp, Homo sapiens
aaataaagtgttgactc

SEQ ID NO: 10765 - DNA, 17 bp, Homo sapiens
aataaagtgttgactcc

SEQ ID NO: 10766 - DNA, 17 bp, Homo sapiens
ataaagtgttgactcct

SEQ ID NO: 10767 - DNA, 17 bp, Homo sapiens
taaagtgttgactcctg

SEQ ID NO: 10768 - DNA, 17 bp, Homo sapiens
aaagtgttgactcctgg

SEQ ID NO: 10769 - DNA, 17 bp, Homo sapiens
aagtgttgactcctggg

SEQ ID NO: 10770 - DNA, 17 bp, Homo sapiens
agtgttgactcctgggc

SEQ ID NO: 10771 - DNA, 17 bp, Homo sapiens
gtgttgactcctgggca

SEQ ID NO: 10772 - DNA, 25 bp, Homo sapiens
cccggacccctccccagggaccacc

SEQ ID NO: 10773 - DNA, 25 bp, Homo sapiens
ccggacccctccccagggaccaccg

SEQ ID NO: 10774 - DNA, 25 bp, Homo sapiens
cggacccctccccagggaccaccgt

SEQ ID NO: 10775 - DNA, 25 bp, Homo sapiens
ggacccctccccagggaccaccgtg

SEQ ID NO: 10776 - DNA, 25 bp, Homo sapiens
gacccctccccagggaccaccgtgg

SEQ ID NO: 10777 - DNA, 25 bp, Homo sapiens
acccctccccagggaccaccgtggc

SEQ ID NO: 10778 - DNA, 25 bp, Homo sapiens
cccctccccagggaccaccgtggct

SEQ ID NO: 10779 - DNA, 25 bp, Homo sapiens
ccctccccagggaccaccgtggctg

SEQ ID NO: 10780 - DNA, 25 bp, Homo sapiens
cctccccagggaccaccgtggctgt

SEQ ID NO: 10781 - DNA, 25 bp, Homo sapiens
ctccccagggaccaccgtggctgtt

SEQ ID NO: 10782 - DNA, 25 bp, Homo sapiens
tccccagggaccaccgtggctgttg

SEQ ID NO: 10783 - DNA, 25 bp, Homo sapiens
ccccagggaccaccgtggctgttgt

SEQ ID NO: 10784 - DNA, 25 bp, Homo sapiens
cccagggaccaccgtggctgttgtg

SEQ ID NO: 10785 - DNA, 25 bp, Homo sapiens
ccagggaccaccgtggctgttgtgg

SEQ ID NO: 10786 - DNA, 25 bp, Homo sapiens
cagggaccaccgtggctgttgtgga

SEQ ID NO: 10787 - DNA, 25 bp, Homo sapiens
agggaccaccgtggctgttgtggat

SEQ ID NO: 10788 - DNA, 25 bp, Homo sapiens
gggaccaccgtggctgttgtggatc

SEQ ID NO: 10789 - DNA, 25 bp, Homo sapiens
ggaccaccgtggctgttgtggatca

SEQ ID NO: 10790 - DNA, 25 bp, Homo sapiens
gaccaccgtggctgttgtggatcaa

SEQ ID NO: 10791 - DNA, 25 bp, Homo sapiens
accaccgtggctgttgtggatcaaa

SEQ ID NO: 10792 - DNA, 25 bp, Homo sapiens
ccaccgtggctgttgtggatcaaaa

SEQ ID NO: 10793 - DNA, 25 bp, Homo sapiens
caccgtggctgttgtggatcaaaat

SEQ ID NO: 10794 - DNA, 25 bp, Homo sapiens
accgtggctgttgtggatcaaaatc

SEQ ID NO: 10795 - DNA, 25 bp, Homo sapiens
ccgtggctgttgtggatcaaaatcc

SEQ ID NO: 10796 - DNA, 25 bp, Homo sapiens
cgtggctgttgtggatcaaaatccc

SEQ ID NO: 10797 - DNA, 25 bp, Homo sapiens
gtggctgttgtggatcaaaatccct

SEQ ID NO: 10798 - DNA, 25 bp, Homo sapiens
tggctgttgtggatcaaaatccctc

SEQ ID NO: 10799 - DNA, 25 bp, Homo sapiens
ggctgttgtggatcaaaatccctct

SEQ ID NO: 10800 - DNA, 25 bp, Homo sapiens
gctgttgtggatcaaaatccctctc

SEQ ID NO: 10801 - DNA, 25 bp, Homo sapiens
ctgttgtggatcaaaatccctctca

SEQ ID NO: 10802 - DNA, 25 bp, Homo sapiens
tgttgtggatcaaaatccctctcag

SEQ ID NO: 10803 - DNA, 25 bp, Homo sapiens
gttgtggatcaaaatccctctcagc

SEQ ID NO: 10804 - DNA, 25 bp, Homo sapiens
ttgtggatcaaaatccctctcagca

SEQ ID NO: 10805 - DNA, 25 bp, Homo sapiens
tgtggatcaaaatccctctcagcag

SEQ ID NO: 10806 - DNA, 25 bp, Homo sapiens
gtggatcaaaatccctctcagcagg

SEQ ID NO: 10807 - DNA, 25 bp, Homo sapiens
tggatcaaaatccctctcagcaggt

SEQ ID NO: 10808 - DNA, 25 bp, Homo sapiens
ggatcaaaatccctctcagcaggtc

SEQ ID NO: 10809 - DNA, 25 bp, Homo sapiens
gatcaaaatccctctcagcaggtcc

SEQ ID NO: 10810 - DNA, 25 bp, Homo sapiens
atcaaaatccctctcagcaggtccg

SEQ ID NO: 10811 - DNA, 25 bp, Homo sapiens
tcaaaatccctctcagcaggtccgc

SEQ ID NO: 10812 - DNA, 25 bp, Homo sapiens
caaaatccctctcagcaggtccgct

SEQ ID NO: 10813 - DNA, 25 bp, Homo sapiens
aaaatccctctcagcaggtccgctt

SEQ ID NO: 10814 - DNA, 25 bp, Homo sapiens
aaatccctctcagcaggtccgctta

SEQ ID NO: 10815 - DNA, 25 bp, Homo sapiens
aatccctctcagcaggtccgcttac

SEQ ID NO: 10816 - DNA, 25 bp, Homo sapiens
atccctctcagcaggtccgcttacc

SEQ ID NO: 10817 - DNA, 25 bp, Homo sapiens
tccctctcagcaggtccgcttacca

SEQ ID NO: 10818 - DNA, 25 bp, Homo sapiens
ccctctcagcaggtccgcttaccag

SEQ ID NO: 10819 - DNA, 25 bp, Homo sapiens
cctctcagcaggtccgcttaccagc

SEQ ID NO: 10820 - DNA, 25 bp, Homo sapiens
ctctcagcaggtccgcttaccagct

SEQ ID NO: 10821 - DNA, 25 bp, Homo sapiens
tctcagcaggtccgcttaccagctg

SEQ ID NO: 10822 - DNA, 25 bp, Homo sapiens
ctcagcaggtccgcttaccagctgg

SEQ ID NO: 10823 - DNA, 25 bp, Homo sapiens
tcagcaggtccgcttaccagctgga

SEQ ID NO: 10824 - DNA, 25 bp, Homo sapiens
cagcaggtccgcttaccagctggag

SEQ ID NO: 10825 - DNA, 25 bp, Homo sapiens
agcaggtccgcttaccagctggagg

SEQ ID NO: 10826 - DNA, 25 bp, Homo sapiens
gcaggtccgcttaccagctggagga

SEQ ID NO: 10827 - DNA, 25 bp, Homo sapiens
caggtccgcttaccagctggaggag

SEQ ID NO: 10828 - DNA, 25 bp, Homo sapiens
aggtccgcttaccagctggaggagg

SEQ ID NO: 10829 - DNA, 25 bp, Homo sapiens
ggtccgcttaccagctggaggaggt

SEQ ID NO: 10830 - DNA, 25 bp, Homo sapiens
gtccgcttaccagctggaggaggtg

SEQ ID NO: 10831 - DNA, 25 bp, Homo sapiens
tccgcttaccagctggaggaggtgc

SEQ ID NO: 10832 - DNA, 25 bp, Homo sapiens
ccgcttaccagctggaggaggtgcc

SEQ ID NO: 10833 - DNA, 25 bp, Homo sapiens
cgcttaccagctggaggaggtgccc

SEQ ID NO: 10834 - DNA, 25 bp, Homo sapiens
gcttaccagctggaggaggtgccca

SEQ ID NO: 10835 - DNA, 25 bp, Homo sapiens
cttaccagctggaggaggtgcccag

SEQ ID NO: 10836 - DNA, 25 bp, Homo sapiens
ttaccagctggaggaggtgcccagg

SEQ ID NO: 10837 - DNA, 25 bp, Homo sapiens
taccagctggaggaggtgcccagga

SEQ ID NO: 10838 - DNA, 25 bp, Homo sapiens
accagctggaggaggtgcccaggat

SEQ ID NO: 10839 - DNA, 25 bp, Homo sapiens
ccagctggaggaggtgcccaggatg

SEQ ID NO: 10840 - DNA, 25 bp, Homo sapiens
cagctggaggaggtgcccaggatgc

SEQ ID NO: 10841 - DNA, 25 bp, Homo sapiens
agctggaggaggtgcccaggatgcc

SEQ ID NO: 10842 - DNA, 25 bp, Homo sapiens
gctggaggaggtgcccaggatgcca

SEQ ID NO: 10843 - DNA, 25 bp, Homo sapiens
ctggaggaggtgcccaggatgccag

SEQ ID NO: 10844 - DNA, 25 bp, Homo sapiens
tggaggaggtgcccaggatgccaga

SEQ ID NO: 10845 - DNA, 25 bp, Homo sapiens
ggaggaggtgcccaggatgccagag

SEQ ID NO: 10846 - DNA, 25 bp, Homo sapiens
gaggaggtgcccaggatgccagagg

SEQ ID NO: 10847 - DNA, 25 bp, Homo sapiens
aggaggtgcccaggatgccagaggc

SEQ ID NO: 10848 - DNA, 25 bp, Homo sapiens
ggaggtgcccaggatgccagaggcc

SEQ ID NO: 10849 - DNA, 25 bp, Homo sapiens
gaggtgcccaggatgccagaggcct

SEQ ID NO: 10850 - DNA, 25 bp, Homo sapiens
aggtgcccaggatgccagaggcctt

SEQ ID NO: 10851 - DNA, 25 bp, Homo sapiens
ggtgcccaggatgccagaggccttt

SEQ ID NO: 10852 - DNA, 25 bp, Homo sapiens
gtgcccaggatgccagaggcctttt

SEQ ID NO: 10853 - DNA, 25 bp, Homo sapiens
tgcccaggatgccagaggccttttc

SEQ ID NO: 10854 - DNA, 25 bp, Homo sapiens
gcccaggatgccagaggccttttct

SEQ ID NO: 10855 - DNA, 25 bp, Homo sapiens
cccaggatgccagaggccttttctg

SEQ ID NO: 10856 - DNA, 25 bp, Homo sapiens
ccaggatgccagaggccttttctgg

SEQ ID NO: 10857 - DNA, 25 bp, Homo sapiens
caggatgccagaggccttttctggg

SEQ ID NO: 10858 - DNA, 25 bp, Homo sapiens
aggatgccagaggccttttctgggt

SEQ ID NO: 10859 - DNA, 25 bp, Homo sapiens
ggatgccagaggccttttctgggtc

SEQ ID NO: 10860 - DNA, 25 bp, Homo sapiens
gatgccagaggccttttctgggtct

SEQ ID NO: 10861 - DNA, 25 bp, Homo sapiens
atgccagaggccttttctgggtctt

SEQ ID NO: 10862 - DNA, 25 bp, Homo sapiens
tgccagaggccttttctgggtctta

SEQ ID NO: 10863 - DNA, 25 bp, Homo sapiens
gccagaggccttttctgggtcttag

SEQ ID NO: 10864 - DNA, 25 bp, Homo sapiens
ccagaggccttttctgggtcttaga

SEQ ID NO: 10865 - DNA, 25 bp, Homo sapiens
cagaggccttttctgggtcttagat

SEQ ID NO: 10866 - DNA, 25 bp, Homo sapiens
agaggccttttctgggtcttagatg

SEQ ID NO: 10867 - DNA, 25 bp, Homo sapiens
gaggccttttctgggtcttagatga

SEQ ID NO: 10868 - DNA, 25 bp, Homo sapiens
aggccttttctgggtcttagatgag

SEQ ID NO: 10869 - DNA, 25 bp, Homo sapiens
ggccttttctgggtcttagatgagg

SEQ ID NO: 10870 - DNA, 25 bp, Homo sapiens
gccttttctgggtcttagatgagga

SEQ ID NO: 10871 - DNA, 25 bp, Homo sapiens
ccttttctgggtcttagatgaggaa

SEQ ID NO: 10872 - DNA, 25 bp, Homo sapiens
cttttctgggtcttagatgaggaag

SEQ ID NO: 10873 - DNA, 25 bp, Homo sapiens
ttttctgggtcttagatgaggaagt

SEQ ID NO: 10874 - DNA, 25 bp, Homo sapiens
tttctgggtcttagatgaggaagtc

SEQ ID NO: 10875 - DNA, 25 bp, Homo sapiens
ttctgggtcttagatgaggaagtcc

SEQ ID NO: 10876 - DNA, 25 bp, Homo sapiens
tctgggtcttagatgaggaagtcca

SEQ ID NO: 10877 - DNA, 25 bp, Homo sapiens
ctgggtcttagatgaggaagtccat

SEQ ID NO: 10878 - DNA, 25 bp, Homo sapiens
tgggtcttagatgaggaagtccatg

SEQ ID NO: 10879 - DNA, 25 bp, Homo sapiens
gggtcttagatgaggaagtccatgt

SEQ ID NO: 10880 - DNA, 25 bp, Homo sapiens
ggtcttagatgaggaagtccatgta

SEQ ID NO: 10881 - DNA, 25 bp, Homo sapiens
gtcttagatgaggaagtccatgtag

SEQ ID NO: 10882 - DNA, 25 bp, Homo sapiens
tcttagatgaggaagtccatgtaga

SEQ ID NO: 10883 - DNA, 25 bp, Homo sapiens
cttagatgaggaagtccatgtagag

SEQ ID NO: 10884 - DNA, 25 bp, Homo sapiens
ttagatgaggaagtccatgtagagg

SEQ ID NO: 10885 - DNA, 25 bp, Homo sapiens
tagatgaggaagtccatgtagaggg

SEQ ID NO: 10886 - DNA, 25 bp, Homo sapiens
agatgaggaagtccatgtagagggc

SEQ ID NO: 10887 - DNA, 25 bp, Homo sapiens
gatgaggaagtccatgtagagggct

SEQ ID NO: 10888 - DNA, 25 bp, Homo sapiens
atgaggaagtccatgtagagggctc

SEQ ID NO: 10889 - DNA, 25 bp, Homo sapiens
tgaggaagtccatgtagagggctcc

SEQ ID NO: 10890 - DNA, 25 bp, Homo sapiens
gaggaagtccatgtagagggctcca

SEQ ID NO: 10891 - DNA, 25 bp, Homo sapiens
aggaagtccatgtagagggctccag

SEQ ID NO: 10892 - DNA, 25 bp, Homo sapiens
ggaagtccatgtagagggctccagt

SEQ ID NO: 10893 - DNA, 25 bp, Homo sapiens
gaagtccatgtagagggctccagtg

SEQ ID NO: 10894 - DNA, 25 bp, Homo sapiens
aagtccatgtagagggctccagtga

SEQ ID NO: 10895 - DNA, 25 bp, Homo sapiens
agtccatgtagagggctccagtgac

SEQ ID NO: 10896 - DNA, 25 bp, Homo sapiens
gtccatgtagagggctccagtgaca

SEQ ID NO: 10897 - DNA, 25 bp, Homo sapiens
tccatgtagagggctccagtgacag

SEQ ID NO: 10898 - DNA, 25 bp, Homo sapiens
ccatgtagagggctccagtgacagt

SEQ ID NO: 10899 - DNA, 25 bp, Homo sapiens
catgtagagggctccagtgacagtg

SEQ ID NO: 10900 - DNA, 25 bp, Homo sapiens
atgtagagggctccagtgacagtgt

SEQ ID NO: 10901 - DNA, 25 bp, Homo sapiens
tgtagagggctccagtgacagtgtg

SEQ ID NO: 10902 - DNA, 25 bp, Homo sapiens
gtagagggctccagtgacagtgtgg

SEQ ID NO: 10903 - DNA, 25 bp, Homo sapiens
tagagggctccagtgacagtgtggt

SEQ ID NO: 10904 - DNA, 25 bp, Homo sapiens
agagggctccagtgacagtgtggtg

SEQ ID NO: 10905 - DNA, 25 bp, Homo sapiens
gagggctccagtgacagtgtggtgc

SEQ ID NO: 10906 - DNA, 25 bp, Homo sapiens
agggctccagtgacagtgtggtgct

SEQ ID NO: 10907 - DNA, 25 bp, Homo sapiens
gggctccagtgacagtgtggtgctc

SEQ ID NO: 10908 - DNA, 25 bp, Homo sapiens
ggctccagtgacagtgtggtgctcg

SEQ ID NO: 10909 - DNA, 25 bp, Homo sapiens
gctccagtgacagtgtggtgctcga

SEQ ID NO: 10910 - DNA, 25 bp, Homo sapiens
ctccagtgacagtgtggtgctcgag

SEQ ID NO: 10911 - DNA, 25 bp, Homo sapiens
tccagtgacagtgtggtgctcgagc

SEQ ID NO: 10912 - DNA, 25 bp, Homo sapiens
ccagtgacagtgtggtgctcgagcg

SEQ ID NO: 10913 - DNA, 25 bp, Homo sapiens
cagtgacagtgtggtgctcgagcgt

SEQ ID NO: 10914 - DNA, 25 bp, Homo sapiens
agtgacagtgtggtgctcgagcgtc

SEQ ID NO: 10915 - DNA, 25 bp, Homo sapiens
gtgacagtgtggtgctcgagcgtct

SEQ ID NO: 10916 - DNA, 25 bp, Homo sapiens
tgacagtgtggtgctcgagcgtctg

SEQ ID NO: 10917 - DNA, 25 bp, Homo sapiens
gacagtgtggtgctcgagcgtctgt

SEQ ID NO: 10918 - DNA, 25 bp, Homo sapiens
acagtgtggtgctcgagcgtctgtg

SEQ ID NO: 10919 - DNA, 25 bp, Homo sapiens
cagtgtggtgctcgagcgtctgtgt

SEQ ID NO: 10920 - DNA, 25 bp, Homo sapiens
agtgtggtgctcgagcgtctgtgtg

SEQ ID NO: 10921 - DNA, 25 bp, Homo sapiens
gtgtggtgctcgagcgtctgtgtgc

SEQ ID NO: 10922 - DNA, 25 bp, Homo sapiens
tgtggtgctcgagcgtctgtgtgct

SEQ ID NO: 10923 - DNA, 25 bp, Homo sapiens
gtggtgctcgagcgtctgtgtgcta

SEQ ID NO: 10924 - DNA, 25 bp, Homo sapiens
tggtgctcgagcgtctgtgtgctac

SEQ ID NO: 10925 - DNA, 25 bp, Homo sapiens
ggtgctcgagcgtctgtgtgctact

SEQ ID NO: 10926 - DNA, 25 bp, Homo sapiens
gtgctcgagcgtctgtgtgctactt

SEQ ID NO: 10927 - DNA, 25 bp, Homo sapiens
tgctcgagcgtctgtgtgctacttt

SEQ ID NO: 10928 - DNA, 25 bp, Homo sapiens
gctcgagcgtctgtgtgctactttc

SEQ ID NO: 10929 - DNA, 25 bp, Homo sapiens
ctcgagcgtctgtgtgctactttcg

SEQ ID NO: 10930 - DNA, 25 bp, Homo sapiens
tcgagcgtctgtgtgctactttcga

SEQ ID NO: 10931 - DNA, 25 bp, Homo sapiens
cgagcgtctgtgtgctactttcgag

SEQ ID NO: 10932 - DNA, 25 bp, Homo sapiens
gagcgtctgtgtgctactttcgaga

SEQ ID NO: 10933 - DNA, 25 bp, Homo sapiens
agcgtctgtgtgctactttcgagaa

SEQ ID NO: 10934 - DNA, 25 bp, Homo sapiens
gcgtctgtgtgctactttcgagaag

SEQ ID NO: 10935 - DNA, 25 bp, Homo sapiens
cgtctgtgtgctactttcgagaaga

SEQ ID NO: 10936 - DNA, 25 bp, Homo sapiens
gtctgtgtgctactttcgagaagaa

SEQ ID NO: 10937 - DNA, 25 bp, Homo sapiens
tctgtgtgctactttcgagaagaaa

SEQ ID NO: 10938 - DNA, 25 bp, Homo sapiens
ctgtgtgctactttcgagaagaaag

SEQ ID NO: 10939 - DNA, 25 bp, Homo sapiens
tgtgtgctactttcgagaagaaagg

SEQ ID NO: 10940 - DNA, 25 bp, Homo sapiens
gtgtgctactttcgagaagaaagga

SEQ ID NO: 10941 - DNA, 25 bp, Homo sapiens
tgtgctactttcgagaagaaaggag

SEQ ID NO: 10942 - DNA, 25 bp, Homo sapiens
gtgctactttcgagaagaaaggagc

SEQ ID NO: 10943 - DNA, 25 bp, Homo sapiens
tgctactttcgagaagaaaggagct

SEQ ID NO: 10944 - DNA, 25 bp, Homo sapiens
gctactttcgagaagaaaggagctg

SEQ ID NO: 10945 - DNA, 25 bp, Homo sapiens
ctactttcgagaagaaaggagctgg

SEQ ID NO: 10946 - DNA, 25 bp, Homo sapiens
tactttcgagaagaaaggagctggg

SEQ ID NO: 10947 - DNA, 25 bp, Homo sapiens
actttcgagaagaaaggagctggga

SEQ ID NO: 10948 - DNA, 25 bp, Homo sapiens
ctttcgagaagaaaggagctgggac

SEQ ID NO: 10949 - DNA, 25 bp, Homo sapiens
tttcgagaagaaaggagctgggact

SEQ ID NO: 10950 - DNA, 25 bp, Homo sapiens
ttcgagaagaaaggagctgggactg

SEQ ID NO: 10951 - DNA, 25 bp, Homo sapiens
tcgagaagaaaggagctgggactga

SEQ ID NO: 10952 - DNA, 25 bp, Homo sapiens
cgagaagaaaggagctgggactgaa

SEQ ID NO: 10953 - DNA, 25 bp, Homo sapiens
gagaagaaaggagctgggactgaag

SEQ ID NO: 10954 - DNA, 25 bp, Homo sapiens
agaagaaaggagctgggactgaagg

SEQ ID NO: 10955 - DNA, 25 bp, Homo sapiens
gaagaaaggagctgggactgaaggg

SEQ ID NO: 10956 - DNA, 25 bp, Homo sapiens
aagaaaggagctgggactgaagggt

SEQ ID NO: 10957 - DNA, 25 bp, Homo sapiens
agaaaggagctgggactgaagggtc

SEQ ID NO: 10958 - DNA, 25 bp, Homo sapiens
gaaaggagctgggactgaagggtcc

SEQ ID NO: 10959 - DNA, 25 bp, Homo sapiens
aaaggagctgggactgaagggtcct

SEQ ID NO: 10960 - DNA, 25 bp, Homo sapiens
aaggagctgggactgaagggtcctc

SEQ ID NO: 10961 - DNA, 25 bp, Homo sapiens
aggagctgggactgaagggtcctct

SEQ ID NO: 10962 - DNA, 25 bp, Homo sapiens
ggagctgggactgaagggtcctctg

SEQ ID NO: 10963 - DNA, 25 bp, Homo sapiens
gagctgggactgaagggtcctctgc

SEQ ID NO: 10964 - DNA, 25 bp, Homo sapiens
agctgggactgaagggtcctctgcc

SEQ ID NO: 10965 - DNA, 25 bp, Homo sapiens
gctgggactgaagggtcctctgccc

SEQ ID NO: 10966 - DNA, 25 bp, Homo sapiens
ctgggactgaagggtcctctgccct

SEQ ID NO: 10967 - DNA, 25 bp, Homo sapiens
tgggactgaagggtcctctgccctg

SEQ ID NO: 10968 - DNA, 25 bp, Homo sapiens
gggactgaagggtcctctgccctgc

SEQ ID NO: 10969 - DNA, 25 bp, Homo sapiens
ggactgaagggtcctctgccctgcg

SEQ ID NO: 10970 - DNA, 25 bp, Homo sapiens
gactgaagggtcctctgccctgcgg

SEQ ID NO: 10971 - DNA, 25 bp, Homo sapiens
actgaagggtcctctgccctgcgga

SEQ ID NO: 10972 - DNA, 25 bp, Homo sapiens
ctgaagggtcctctgccctgcggac

SEQ ID NO: 10973 - DNA, 25 bp, Homo sapiens
tgaagggtcctctgccctgcggacc

SEQ ID NO: 10974 - DNA, 25 bp, Homo sapiens
gaagggtcctctgccctgcggacct

SEQ ID NO: 10975 - DNA, 25 bp, Homo sapiens
aagggtcctctgccctgcggacctg

SEQ ID NO: 10976 - DNA, 25 bp, Homo sapiens
agggtcctctgccctgcggacctgt

SEQ ID NO: 10977 - DNA, 25 bp, Homo sapiens
gggtcctctgccctgcggacctgtg

SEQ ID NO: 10978 - DNA, 25 bp, Homo sapiens
ggtcctctgccctgcggacctgtga

SEQ ID NO: 10979 - DNA, 25 bp, Homo sapiens
gtcctctgccctgcggacctgtgag

SEQ ID NO: 10980 - DNA, 25 bp, Homo sapiens
tcctctgccctgcggacctgtgagc

SEQ ID NO: 10981 - DNA, 25 bp, Homo sapiens
cctctgccctgcggacctgtgagca

SEQ ID NO: 10982 - DNA, 25 bp, Homo sapiens
ctctgccctgcggacctgtgagcag

SEQ ID NO: 10983 - DNA, 25 bp, Homo sapiens
tctgccctgcggacctgtgagcagc

SEQ ID NO: 10984 - DNA, 25 bp, Homo sapiens
ctgccctgcggacctgtgagcagcc

SEQ ID NO: 10985 - DNA, 25 bp, Homo sapiens
tgccctgcggacctgtgagcagccc

SEQ ID NO: 10986 - DNA, 25 bp, Homo sapiens
gccctgcggacctgtgagcagcccc

SEQ ID NO: 10987 - DNA, 25 bp, Homo sapiens
ccctgcggacctgtgagcagcccct

SEQ ID NO: 10988 - DNA, 25 bp, Homo sapiens
cctgcggacctgtgagcagcccctc

SEQ ID NO: 10989 - DNA, 25 bp, Homo sapiens
ctgcggacctgtgagcagcccctcc

SEQ ID NO: 10990 - DNA, 25 bp, Homo sapiens
tgcggacctgtgagcagcccctcca

SEQ ID NO: 10991 - DNA, 25 bp, Homo sapiens
gcggacctgtgagcagcccctccag

SEQ ID NO: 10992 - DNA, 25 bp, Homo sapiens
cggacctgtgagcagcccctccagt

SEQ ID NO: 10993 - DNA, 25 bp, Homo sapiens
ggacctgtgagcagcccctccagtg

SEQ ID NO: 10994 - DNA, 25 bp, Homo sapiens
gacctgtgagcagcccctccagtgt

SEQ ID NO: 10995 - DNA, 25 bp, Homo sapiens
acctgtgagcagcccctccagtgtg

SEQ ID NO: 10996 - DNA, 25 bp, Homo sapiens
cctgtgagcagcccctccagtgtga

SEQ ID NO: 10997 - DNA, 25 bp, Homo sapiens
ctgtgagcagcccctccagtgtgag

SEQ ID NO: 10998 - DNA, 25 bp, Homo sapiens
tgtgagcagcccctccagtgtgaga

SEQ ID NO: 10999 - DNA, 25 bp, Homo sapiens
gtgagcagcccctccagtgtgagat

SEQ ID NO: 11000 - DNA, 25 bp, Homo sapiens
tgagcagcccctccagtgtgagatt

SEQ ID NO: 11001 - DNA, 25 bp, Homo sapiens
gagcagcccctccagtgtgagattt

SEQ ID NO: 11002 - DNA, 25 bp, Homo sapiens
agcagcccctccagtgtgagatttt

SEQ ID NO: 11003 - DNA, 25 bp, Homo sapiens
gcagcccctccagtgtgagattttc

SEQ ID NO: 11004 - DNA, 25 bp, Homo sapiens
cagcccctccagtgtgagattttcc

SEQ ID NO: 11005 - DNA, 25 bp, Homo sapiens
agcccctccagtgtgagattttcca

SEQ ID NO: 11006 - DNA, 25 bp, Homo sapiens
gcccctccagtgtgagattttccac

SEQ ID NO: 11007 - DNA, 25 bp, Homo sapiens
cccctccagtgtgagattttccacc

SEQ ID NO: 11008 - DNA, 25 bp, Homo sapiens
ccctccagtgtgagattttccacca

SEQ ID NO: 11009 - DNA, 25 bp, Homo sapiens
cctccagtgtgagattttccaccag

SEQ ID NO: 11010 - DNA, 25 bp, Homo sapiens
ctccagtgtgagattttccaccagt

SEQ ID NO: 11011 - DNA, 25 bp, Homo sapiens
tccagtgtgagattttccaccagtt

SEQ ID NO: 11012 - DNA, 25 bp, Homo sapiens
ccagtgtgagattttccaccagttg

SEQ ID NO: 11013 - DNA, 25 bp, Homo sapiens
cagtgtgagattttccaccagttgg

SEQ ID NO: 11014 - DNA, 25 bp, Homo sapiens
agtgtgagattttccaccagttggg

SEQ ID NO: 11015 - DNA, 25 bp, Homo sapiens
gtgtgagattttccaccagttggga

SEQ ID NO: 11016 - DNA, 25 bp, Homo sapiens
tgtgagattttccaccagttgggat

SEQ ID NO: 11017 - DNA, 25 bp, Homo sapiens
gtgagattttccaccagttgggatg

SEQ ID NO: 11018 - DNA, 25 bp, Homo sapiens
tgagattttccaccagttgggatgg

SEQ ID NO: 11019 - DNA, 25 bp, Homo sapiens
gagattttccaccagttgggatggg

SEQ ID NO: 11020 - DNA, 25 bp, Homo sapiens
agattttccaccagttgggatggga

SEQ ID NO: 11021 - DNA, 25 bp, Homo sapiens
gattttccaccagttgggatgggac

SEQ ID NO: 11022 - DNA, 25 bp, Homo sapiens
attttccaccagttgggatgggacc

SEQ ID NO: 11023 - DNA, 25 bp, Homo sapiens
ttttccaccagttgggatgggaccc

SEQ ID NO: 11024 - DNA, 25 bp, Homo sapiens
tttccaccagttgggatgggaccct

SEQ ID NO: 11025 - DNA, 25 bp, Homo sapiens
ttccaccagttgggatgggaccctg

SEQ ID NO: 11026 - DNA, 25 bp, Homo sapiens
tccaccagttgggatgggaccctgt

SEQ ID NO: 11027 - DNA, 25 bp, Homo sapiens
ccaccagttgggatgggaccctgtg

SEQ ID NO: 11028 - DNA, 25 bp, Homo sapiens
caccagttgggatgggaccctgtgc

SEQ ID NO: 11029 - DNA, 25 bp, Homo sapiens
accagttgggatgggaccctgtgcg

SEQ ID NO: 11030 - DNA, 25 bp, Homo sapiens
ccagttgggatgggaccctgtgcgg

SEQ ID NO: 11031 - DNA, 25 bp, Homo sapiens
cagttgggatgggaccctgtgcggt

SEQ ID NO: 11032 - DNA, 25 bp, Homo sapiens
agttgggatgggaccctgtgcggta

SEQ ID NO: 11033 - DNA, 25 bp, Homo sapiens
gttgggatgggaccctgtgcggtac

SEQ ID NO: 11034 - DNA, 25 bp, Homo sapiens
ttgggatgggaccctgtgcggtacg

SEQ ID NO: 11035 - DNA, 25 bp, Homo sapiens
tgggatgggaccctgtgcggtacga

SEQ ID NO: 11036 - DNA, 25 bp, Homo sapiens
gggatgggaccctgtgcggtacgac

SEQ ID NO: 11037 - DNA, 25 bp, Homo sapiens
ggatgggaccctgtgcggtacgacc

SEQ ID NO: 11038 - DNA, 25 bp, Homo sapiens
gatgggaccctgtgcggtacgacct

SEQ ID NO: 11039 - DNA, 25 bp, Homo sapiens
atgggaccctgtgcggtacgacctc

SEQ ID NO: 11040 - DNA, 25 bp, Homo sapiens
tgggaccctgtgcggtacgacctca

SEQ ID NO: 11041 - DNA, 25 bp, Homo sapiens
gggaccctgtgcggtacgacctcac

SEQ ID NO: 11042 - DNA, 25 bp, Homo sapiens
ggaccctgtgcggtacgacctcacg

SEQ ID NO: 11043 - DNA, 25 bp, Homo sapiens
gaccctgtgcggtacgacctcacgg

SEQ ID NO: 11044 - DNA, 25 bp, Homo sapiens
accctgtgcggtacgacctcacggg

SEQ ID NO: 11045 - DNA, 25 bp, Homo sapiens
ccctgtgcggtacgacctcacgggc

SEQ ID NO: 11046 - DNA, 25 bp, Homo sapiens
cctgtgcggtacgacctcacgggct

SEQ ID NO: 11047 - DNA, 25 bp, Homo sapiens
ctgtgcggtacgacctcacgggctg

SEQ ID NO: 11048 - DNA, 25 bp, Homo sapiens
tgtgcggtacgacctcacgggctgg

SEQ ID NO: 11049 - DNA, 25 bp, Homo sapiens
gtgcggtacgacctcacgggctggc

SEQ ID NO: 11050 - DNA, 25 bp, Homo sapiens
tgcggtacgacctcacgggctggct

SEQ ID NO: 11051 - DNA, 25 bp, Homo sapiens
gcggtacgacctcacgggctggctc

SEQ ID NO: 11052 - DNA, 25 bp, Homo sapiens
cggtacgacctcacgggctggctcc

SEQ ID NO: 11053 - DNA, 25 bp, Homo sapiens
ggtacgacctcacgggctggctcca

SEQ ID NO: 11054 - DNA, 25 bp, Homo sapiens
gtacgacctcacgggctggctccac

SEQ ID NO: 11055 - DNA, 25 bp, Homo sapiens
tacgacctcacgggctggctccaca

SEQ ID NO: 11056 - DNA, 25 bp, Homo sapiens
acgacctcacgggctggctccacag

SEQ ID NO: 11057 - DNA, 25 bp, Homo sapiens
cgacctcacgggctggctccacaga

SEQ ID NO: 11058 - DNA, 25 bp, Homo sapiens
gacctcacgggctggctccacagag

SEQ ID NO: 11059 - DNA, 25 bp, Homo sapiens
acctcacgggctggctccacagagc

SEQ ID NO: 11060 - DNA, 25 bp, Homo sapiens
cctcacgggctggctccacagagcc

SEQ ID NO: 11061 - DNA, 25 bp, Homo sapiens
ctcacgggctggctccacagagcca

SEQ ID NO: 11062 - DNA, 25 bp, Homo sapiens
tcacgggctggctccacagagccaa

SEQ ID NO: 11063 - DNA, 25 bp, Homo sapiens
cacgggctggctccacagagccaag

SEQ ID NO: 11064 - DNA, 25 bp, Homo sapiens
acgggctggctccacagagccaagc

SEQ ID NO: 11065 - DNA, 25 bp, Homo sapiens
cgggctggctccacagagccaagcc

SEQ ID NO: 11066 - DNA, 25 bp, Homo sapiens
gggctggctccacagagccaagccc

SEQ ID NO: 11067 - DNA, 25 bp, Homo sapiens
ggctggctccacagagccaagccca

SEQ ID NO: 11068 - DNA, 25 bp, Homo sapiens
gctggctccacagagccaagcccaa

SEQ ID NO: 11069 - DNA, 25 bp, Homo sapiens
ctggctccacagagccaagcccaac

SEQ ID NO: 11070 - DNA, 25 bp, Homo sapiens
tggctccacagagccaagcccaacc

SEQ ID NO: 11071 - DNA, 25 bp, Homo sapiens
ggctccacagagccaagcccaacct

SEQ ID NO: 11072 - DNA, 25 bp, Homo sapiens
gctccacagagccaagcccaacctc

SEQ ID NO: 11073 - DNA, 25 bp, Homo sapiens
ctccacagagccaagcccaacctct

SEQ ID NO: 11074 - DNA, 25 bp, Homo sapiens
tccacagagccaagcccaacctctc

SEQ ID NO: 11075 - DNA, 25 bp, Homo sapiens
ccacagagccaagcccaacctctcg

SEQ ID NO: 11076 - DNA, 25 bp, Homo sapiens
cacagagccaagcccaacctctcgg

SEQ ID NO: 11077 - DNA, 25 bp, Homo sapiens
acagagccaagcccaacctctcggc

SEQ ID NO: 11078 - DNA, 25 bp, Homo sapiens
cagagccaagcccaacctctcggcc

SEQ ID NO: 11079 - DNA, 25 bp, Homo sapiens
agagccaagcccaacctctcggccc

SEQ ID NO: 11080 - DNA, 25 bp, Homo sapiens
gagccaagcccaacctctcggccct

SEQ ID NO: 11081 - DNA, 25 bp, Homo sapiens
agccaagcccaacctctcggccctg

SEQ ID NO: 11082 - DNA, 25 bp, Homo sapiens
gccaagcccaacctctcggccctgg

SEQ ID NO: 11083 - DNA, 25 bp, Homo sapiens
ccaagcccaacctctcggccctgga

SEQ ID NO: 11084 - DNA, 25 bp, Homo sapiens
caagcccaacctctcggccctggat

SEQ ID NO: 11085 - DNA, 25 bp, Homo sapiens
aagcccaacctctcggccctggatg

SEQ ID NO: 11086 - DNA, 25 bp, Homo sapiens
agcccaacctctcggccctggatgc

SEQ ID NO: 11087 - DNA, 25 bp, Homo sapiens
gcccaacctctcggccctggatgca

SEQ ID NO: 11088 - DNA, 25 bp, Homo sapiens
cccaacctctcggccctggatgcac

SEQ ID NO: 11089 - DNA, 25 bp, Homo sapiens
ccaacctctcggccctggatgcacc

SEQ ID NO: 11090 - DNA, 25 bp, Homo sapiens
caacctctcggccctggatgcaccc

SEQ ID NO: 11091 - DNA, 25 bp, Homo sapiens
aacctctcggccctggatgcacccc

SEQ ID NO: 11092 - DNA, 25 bp, Homo sapiens
acctctcggccctggatgcacccca

SEQ ID NO: 11093 - DNA, 25 bp, Homo sapiens
cctctcggccctggatgcaccccag

SEQ ID NO: 11094 - DNA, 25 bp, Homo sapiens
ctctcggccctggatgcaccccagg

SEQ ID NO: 11095 - DNA, 25 bp, Homo sapiens
tctcggccctggatgcaccccaggt

SEQ ID NO: 11096 - DNA, 25 bp, Homo sapiens
ctcggccctggatgcaccccaggtc

SEQ ID NO: 11097 - DNA, 25 bp, Homo sapiens
tcggccctggatgcaccccaggtcc

SEQ ID NO: 11098 - DNA, 25 bp, Homo sapiens
cggccctggatgcaccccaggtcct

SEQ ID NO: 11099 - DNA, 25 bp, Homo sapiens
ggccctggatgcaccccaggtcctg

SEQ ID NO: 11100 - DNA, 25 bp, Homo sapiens
gccctggatgcaccccaggtcctgc

SEQ ID NO: 11101 - DNA, 25 bp, Homo sapiens
ccctggatgcaccccaggtcctgca

SEQ ID NO: 11102 - DNA, 25 bp, Homo sapiens
cctggatgcaccccaggtcctgcaa

SEQ ID NO: 11103 - DNA, 25 bp, Homo sapiens
ctggatgcaccccaggtcctgcaac

SEQ ID NO: 11104 - DNA, 25 bp, Homo sapiens
tggatgcaccccaggtcctgcaaca

SEQ ID NO: 11105 - DNA, 25 bp, Homo sapiens
ggatgcaccccaggtcctgcaacag

SEQ ID NO: 11106 - DNA, 25 bp, Homo sapiens
gatgcaccccaggtcctgcaacagt

SEQ ID NO: 11107 - DNA, 25 bp, Homo sapiens
atgcaccccaggtcctgcaacagtc

SEQ ID NO: 11108 - DNA, 25 bp, Homo sapiens
tgcaccccaggtcctgcaacagtca

SEQ ID NO: 11109 - DNA, 25 bp, Homo sapiens
gcaccccaggtcctgcaacagtcaa

SEQ ID NO: 11110 - DNA, 25 bp, Homo sapiens
caccccaggtcctgcaacagtcaaa

SEQ ID NO: 11111 - DNA, 25 bp, Homo sapiens
accccaggtcctgcaacagtcaaaa

SEQ ID NO: 11112 - DNA, 25 bp, Homo sapiens
ccccaggtcctgcaacagtcaaaaa

SEQ ID NO: 11113 - DNA, 25 bp, Homo sapiens
cccaggtcctgcaacagtcaaaaag

SEQ ID NO: 11114 - DNA, 25 bp, Homo sapiens
ccaggtcctgcaacagtcaaaaaga

SEQ ID NO: 11115 - DNA, 25 bp, Homo sapiens
caggtcctgcaacagtcaaaaagag

SEQ ID NO: 11116 - DNA, 25 bp, Homo sapiens
aggtcctgcaacagtcaaaaagaga

SEQ ID NO: 11117 - DNA, 25 bp, Homo sapiens
ggtcctgcaacagtcaaaaagagag

SEQ ID NO: 11118 - DNA, 25 bp, Homo sapiens
gtcctgcaacagtcaaaaagagagg

SEQ ID NO: 11119 - DNA, 25 bp, Homo sapiens
tcctgcaacagtcaaaaagagagga

SEQ ID NO: 11120 - DNA, 25 bp, Homo sapiens
cctgcaacagtcaaaaagagaggag

SEQ ID NO: 11121 - DNA, 25 bp, Homo sapiens
ctgcaacagtcaaaaagagaggagc

SEQ ID NO: 11122 - DNA, 25 bp, Homo sapiens
tgcaacagtcaaaaagagaggagct

SEQ ID NO: 11123 - DNA, 25 bp, Homo sapiens
gcaacagtcaaaaagagaggagctg

SEQ ID NO: 11124 - DNA, 25 bp, Homo sapiens
caacagtcaaaaagagaggagctgc

SEQ ID NO: 11125 - DNA, 25 bp, Homo sapiens
aacagtcaaaaagagaggagctgcg

SEQ ID NO: 11126 - DNA, 25 bp, Homo sapiens
acagtcaaaaagagaggagctgcgg

SEQ ID NO: 11127 - DNA, 25 bp, Homo sapiens
cagtcaaaaagagaggagctgcgga

SEQ ID NO: 11128 - DNA, 25 bp, Homo sapiens
agtcaaaaagagaggagctgcggag

SEQ ID NO: 11129 - DNA, 25 bp, Homo sapiens
gtcaaaaagagaggagctgcggagt

SEQ ID NO: 11130 - DNA, 25 bp, Homo sapiens
tcaaaaagagaggagctgcggagtc

SEQ ID NO: 11131 - DNA, 25 bp, Homo sapiens
caaaaagagaggagctgcggagtct

SEQ ID NO: 11132 - DNA, 25 bp, Homo sapiens
aaaaagagaggagctgcggagtcta

SEQ ID NO: 11133 - DNA, 25 bp, Homo sapiens
aaaagagaggagctgcggagtctat

SEQ ID NO: 11134 - DNA, 25 bp, Homo sapiens
aaagagaggagctgcggagtctatt

SEQ ID NO: 11135 - DNA, 25 bp, Homo sapiens
aagagaggagctgcggagtctattc

SEQ ID NO: 11136 - DNA, 25 bp, Homo sapiens
agagaggagctgcggagtctattcc

SEQ ID NO: 11137 - DNA, 25 bp, Homo sapiens
gagaggagctgcggagtctattcca

SEQ ID NO: 11138 - DNA, 25 bp, Homo sapiens
agaggagctgcggagtctattccag

SEQ ID NO: 11139 - DNA, 25 bp, Homo sapiens
gaggagctgcggagtctattccagg

SEQ ID NO: 11140 - DNA, 25 bp, Homo sapiens
aggagctgcggagtctattccaggc

SEQ ID NO: 11141 - DNA, 25 bp, Homo sapiens
ggagctgcggagtctattccaggcc

SEQ ID NO: 11142 - DNA, 25 bp, Homo sapiens
gagctgcggagtctattccaggccc

SEQ ID NO: 11143 - DNA, 25 bp, Homo sapiens
agctgcggagtctattccaggcccg

SEQ ID NO: 11144 - DNA, 25 bp, Homo sapiens
gctgcggagtctattccaggcccgg

SEQ ID NO: 11145 - DNA, 25 bp, Homo sapiens
ctgcggagtctattccaggcccggg

SEQ ID NO: 11146 - DNA, 25 bp, Homo sapiens
tgcggagtctattccaggcccgggc

SEQ ID NO: 11147 - DNA, 25 bp, Homo sapiens
gcggagtctattccaggcccgggcc

SEQ ID NO: 11148 - DNA, 25 bp, Homo sapiens
cggagtctattccaggcccgggcca

SEQ ID NO: 11149 - DNA, 25 bp, Homo sapiens
ggagtctattccaggcccgggccaa

SEQ ID NO: 11150 - DNA, 25 bp, Homo sapiens
gagtctattccaggcccgggccaag

SEQ ID NO: 11151 - DNA, 25 bp, Homo sapiens
agtctattccaggcccgggccaagc

SEQ ID NO: 11152 - DNA, 25 bp, Homo sapiens
gtctattccaggcccgggccaagct

SEQ ID NO: 11153 - DNA, 25 bp, Homo sapiens
tctattccaggcccgggccaagctg

SEQ ID NO: 11154 - DNA, 25 bp, Homo sapiens
ctattccaggcccgggccaagctgc

SEQ ID NO: 11155 - DNA, 25 bp, Homo sapiens
tattccaggcccgggccaagctgcc

SEQ ID NO: 11156 - DNA, 25 bp, Homo sapiens
attccaggcccgggccaagctgcct

SEQ ID NO: 11157 - DNA, 25 bp, Homo sapiens
ttccaggcccgggccaagctgcctc

SEQ ID NO: 11158 - DNA, 25 bp, Homo sapiens
tccaggcccgggccaagctgcctcc

SEQ ID NO: 11159 - DNA, 25 bp, Homo sapiens
ccaggcccgggccaagctgcctcct

SEQ ID NO: 11160 - DNA, 25 bp, Homo sapiens
caggcccgggccaagctgcctcctg

SEQ ID NO: 11161 - DNA, 25 bp, Homo sapiens
aggcccgggccaagctgcctcctgt

SEQ ID NO: 11162 - DNA, 25 bp, Homo sapiens
ggcccgggccaagctgcctcctgtg

SEQ ID NO: 11163 - DNA, 25 bp, Homo sapiens
gcccgggccaagctgcctcctgtgt

SEQ ID NO: 11164 - DNA, 25 bp, Homo sapiens
cccgggccaagctgcctcctgtgtg

SEQ ID NO: 11165 - DNA, 25 bp, Homo sapiens
ccgggccaagctgcctcctgtgtgc

SEQ ID NO: 11166 - DNA, 25 bp, Homo sapiens
cgggccaagctgcctcctgtgtgcc

SEQ ID NO: 11167 - DNA, 25 bp, Homo sapiens
gggccaagctgcctcctgtgtgccg

SEQ ID NO: 11168 - DNA, 25 bp, Homo sapiens
ggccaagctgcctcctgtgtgccgg

SEQ ID NO: 11169 - DNA, 25 bp, Homo sapiens
gccaagctgcctcctgtgtgccggg

SEQ ID NO: 11170 - DNA, 25 bp, Homo sapiens
ccaagctgcctcctgtgtgccgggc

SEQ ID NO: 11171 - DNA, 25 bp, Homo sapiens
caagctgcctcctgtgtgccgggct

SEQ ID NO: 11172 - DNA, 25 bp, Homo sapiens
aagctgcctcctgtgtgccgggctg

SEQ ID NO: 11173 - DNA, 25 bp, Homo sapiens
agctgcctcctgtgtgccgggctgt

SEQ ID NO: 11174 - DNA, 25 bp, Homo sapiens
gctgcctcctgtgtgccgggctgtg

SEQ ID NO: 11175 - DNA, 25 bp, Homo sapiens
ctgcctcctgtgtgccgggctgtgg

SEQ ID NO: 11176 - DNA, 25 bp, Homo sapiens
tgcctcctgtgtgccgggctgtggc

SEQ ID NO: 11177 - DNA, 25 bp, Homo sapiens
gcctcctgtgtgccgggctgtggca

SEQ ID NO: 11178 - DNA, 25 bp, Homo sapiens
cctcctgtgtgccgggctgtggcag

SEQ ID NO: 11179 - DNA, 25 bp, Homo sapiens
ctcctgtgtgccgggctgtggcagg

SEQ ID NO: 11180 - DNA, 25 bp, Homo sapiens
tcctgtgtgccgggctgtggcaggc

SEQ ID NO: 11181 - DNA, 25 bp, Homo sapiens
cctgtgtgccgggctgtggcaggcc

SEQ ID NO: 11182 - DNA, 25 bp, Homo sapiens
ctgtgtgccgggctgtggcaggcct

SEQ ID NO: 11183 - DNA, 25 bp, Homo sapiens
tgtgtgccgggctgtggcaggcctg

SEQ ID NO: 11184 - DNA, 25 bp, Homo sapiens
gtgtgccgggctgtggcaggcctgg

SEQ ID NO: 11185 - DNA, 25 bp, Homo sapiens
tgtgccgggctgtggcaggcctgga

SEQ ID NO: 11186 - DNA, 25 bp, Homo sapiens
gtgccgggctgtggcaggcctggag

SEQ ID NO: 11187 - DNA, 25 bp, Homo sapiens
tgccgggctgtggcaggcctggagg

SEQ ID NO: 11188 - DNA, 25 bp, Homo sapiens
gccgggctgtggcaggcctggaggg

SEQ ID NO: 11189 - DNA, 25 bp, Homo sapiens
ccgggctgtggcaggcctggagggc

SEQ ID NO: 11190 - DNA, 25 bp, Homo sapiens
cgggctgtggcaggcctggagggca

SEQ ID NO: 11191 - DNA, 25 bp, Homo sapiens
gggctgtggcaggcctggagggcac

SEQ ID NO: 11192 - DNA, 25 bp, Homo sapiens
ggctgtggcaggcctggagggcacc

SEQ ID NO: 11193 - DNA, 25 bp, Homo sapiens
gctgtggcaggcctggagggcacct

SEQ ID NO: 11194 - DNA, 25 bp, Homo sapiens
ctgtggcaggcctggagggcacctc

SEQ ID NO: 11195 - DNA, 25 bp, Homo sapiens
tgtggcaggcctggagggcacctcc

SEQ ID NO: 11196 - DNA, 25 bp, Homo sapiens
gtggcaggcctggagggcacctccc

SEQ ID NO: 11197 - DNA, 25 bp, Homo sapiens
tggcaggcctggagggcacctccca

SEQ ID NO: 11198 - DNA, 25 bp, Homo sapiens
ggcaggcctggagggcacctcccag

SEQ ID NO: 11199 - DNA, 25 bp, Homo sapiens
gcaggcctggagggcacctcccagc

SEQ ID NO: 11200 - DNA, 25 bp, Homo sapiens
caggcctggagggcacctcccagca

SEQ ID NO: 11201 - DNA, 25 bp, Homo sapiens
aggcctggagggcacctcccagcag

SEQ ID NO: 11202 - DNA, 25 bp, Homo sapiens
ggcctggagggcacctcccagcagg

SEQ ID NO: 11203 - DNA, 25 bp, Homo sapiens
gcctggagggcacctcccagcaggc

SEQ ID NO: 11204 - DNA, 25 bp, Homo sapiens
cctggagggcacctcccagcaggcc

SEQ ID NO: 11205 - DNA, 25 bp, Homo sapiens
ctggagggcacctcccagcaggccc

SEQ ID NO: 11206 - DNA, 25 bp, Homo sapiens
tggagggcacctcccagcaggccct

SEQ ID NO: 11207 - DNA, 25 bp, Homo sapiens
ggagggcacctcccagcaggccctg

SEQ ID NO: 11208 - DNA, 25 bp, Homo sapiens
gagggcacctcccagcaggccctgc

SEQ ID NO: 11209 - DNA, 25 bp, Homo sapiens
agggcacctcccagcaggccctgca

SEQ ID NO: 11210 - DNA, 25 bp, Homo sapiens
gggcacctcccagcaggccctgcag

SEQ ID NO: 11211 - DNA, 25 bp, Homo sapiens
ggcacctcccagcaggccctgcaga

SEQ ID NO: 11212 - DNA, 25 bp, Homo sapiens
gcacctcccagcaggccctgcagag

SEQ ID NO: 11213 - DNA, 25 bp, Homo sapiens
cacctcccagcaggccctgcagagg

SEQ ID NO: 11214 - DNA, 25 bp, Homo sapiens
acctcccagcaggccctgcagagga

SEQ ID NO: 11215 - DNA, 25 bp, Homo sapiens
cctcccagcaggccctgcagaggag

SEQ ID NO: 11216 - DNA, 25 bp, Homo sapiens
ctcccagcaggccctgcagaggagc

SEQ ID NO: 11217 - DNA, 25 bp, Homo sapiens
tcccagcaggccctgcagaggagcc

SEQ ID NO: 11218 - DNA, 25 bp, Homo sapiens
cccagcaggccctgcagaggagccg

SEQ ID NO: 11219 - DNA, 25 bp, Homo sapiens
ccagcaggccctgcagaggagccgc

SEQ ID NO: 11220 - DNA, 25 bp, Homo sapiens
cagcaggccctgcagaggagccgca

SEQ ID NO: 11221 - DNA, 25 bp, Homo sapiens
agcaggccctgcagaggagccgcat

SEQ ID NO: 11222 - DNA, 25 bp, Homo sapiens
gcaggccctgcagaggagccgcatg

SEQ ID NO: 11223 - DNA, 25 bp, Homo sapiens
caggccctgcagaggagccgcatgg

SEQ ID NO: 11224 - DNA, 25 bp, Homo sapiens
aggccctgcagaggagccgcatggt

SEQ ID NO: 11225 - DNA, 25 bp, Homo sapiens
ggccctgcagaggagccgcatggtg

SEQ ID NO: 11226 - DNA, 25 bp, Homo sapiens
gccctgcagaggagccgcatggtga

SEQ ID NO: 11227 - DNA, 25 bp, Homo sapiens
ccctgcagaggagccgcatggtgag

SEQ ID NO: 11228 - DNA, 25 bp, Homo sapiens
cctgcagaggagccgcatggtgagg

SEQ ID NO: 11229 - DNA, 25 bp, Homo sapiens
ctgcagaggagccgcatggtgagga

SEQ ID NO: 11230 - DNA, 25 bp, Homo sapiens
tgcagaggagccgcatggtgaggag

SEQ ID NO: 11231 - DNA, 25 bp, Homo sapiens
gcagaggagccgcatggtgaggagg

SEQ ID NO: 11232 - DNA, 25 bp, Homo sapiens
cagaggagccgcatggtgaggagga

SEQ ID NO: 11233 - DNA, 25 bp, Homo sapiens
agaggagccgcatggtgaggaggac

SEQ ID NO: 11234 - DNA, 25 bp, Homo sapiens
gaggagccgcatggtgaggaggacc

SEQ ID NO: 11235 - DNA, 25 bp, Homo sapiens
aggagccgcatggtgaggaggacct

SEQ ID NO: 11236 - DNA, 25 bp, Homo sapiens
ggagccgcatggtgaggaggacctt

SEQ ID NO: 11237 - DNA, 25 bp, Homo sapiens
gagccgcatggtgaggaggaccttt

SEQ ID NO: 11238 - DNA, 25 bp, Homo sapiens
agccgcatggtgaggaggacctttg

SEQ ID NO: 11239 - DNA, 25 bp, Homo sapiens
gccgcatggtgaggaggacctttgc

SEQ ID NO: 11240 - DNA, 25 bp, Homo sapiens
ccgcatggtgaggaggacctttgcc

SEQ ID NO: 11241 - DNA, 25 bp, Homo sapiens
cgcatggtgaggaggacctttgcca

SEQ ID NO: 11242 - DNA, 25 bp, Homo sapiens
gcatggtgaggaggacctttgccag

SEQ ID NO: 11243 - DNA, 25 bp, Homo sapiens
catggtgaggaggacctttgccagc

SEQ ID NO: 11244 - DNA, 25 bp, Homo sapiens
atggtgaggaggacctttgccagca

SEQ ID NO: 11245 - DNA, 25 bp, Homo sapiens
tggtgaggaggacctttgccagcag

SEQ ID NO: 11246 - DNA, 25 bp, Homo sapiens
ggtgaggaggacctttgccagcagc

SEQ ID NO: 11247 - DNA, 25 bp, Homo sapiens
gtgaggaggacctttgccagcagcc

SEQ ID NO: 11248 - DNA, 25 bp, Homo sapiens
tgaggaggacctttgccagcagcct

SEQ ID NO: 11249 - DNA, 25 bp, Homo sapiens
gaggaggacctttgccagcagcctt

SEQ ID NO: 11250 - DNA, 25 bp, Homo sapiens
aggaggacctttgccagcagccttg

SEQ ID NO: 11251 - DNA, 25 bp, Homo sapiens
ggaggacctttgccagcagccttgc

SEQ ID NO: 11252 - DNA, 25 bp, Homo sapiens
gaggacctttgccagcagccttgcc

SEQ ID NO: 11253 - DNA, 25 bp, Homo sapiens
aggacctttgccagcagccttgccg

SEQ ID NO: 11254 - DNA, 25 bp, Homo sapiens
ggacctttgccagcagccttgccgc

SEQ ID NO: 11255 - DNA, 25 bp, Homo sapiens
gacctttgccagcagccttgccgcg

SEQ ID NO: 11256 - DNA, 25 bp, Homo sapiens
acctttgccagcagccttgccgcgg

SEQ ID NO: 11257 - DNA, 25 bp, Homo sapiens
cctttgccagcagccttgccgcggt

SEQ ID NO: 11258 - DNA, 25 bp, Homo sapiens
ctttgccagcagccttgccgcggtg

SEQ ID NO: 11259 - DNA, 25 bp, Homo sapiens
tttgccagcagccttgccgcggtga

SEQ ID NO: 11260 - DNA, 25 bp, Homo sapiens
ttgccagcagccttgccgcggtgag

SEQ ID NO: 11261 - DNA, 25 bp, Homo sapiens
tgccagcagccttgccgcggtgagg

SEQ ID NO: 11262 - DNA, 25 bp, Homo sapiens
gccagcagccttgccgcggtgagga

SEQ ID NO: 11263 - DNA, 25 bp, Homo sapiens
ccagcagccttgccgcggtgaggag

SEQ ID NO: 11264 - DNA, 25 bp, Homo sapiens
cagcagccttgccgcggtgaggagg

SEQ ID NO: 11265 - DNA, 25 bp, Homo sapiens
agcagccttgccgcggtgaggagga

SEQ ID NO: 11266 - DNA, 25 bp, Homo sapiens
gcagccttgccgcggtgaggaggaa

SEQ ID NO: 11267 - DNA, 25 bp, Homo sapiens
cagccttgccgcggtgaggaggaaa

SEQ ID NO: 11268 - DNA, 25 bp, Homo sapiens
agccttgccgcggtgaggaggaaag

SEQ ID NO: 11269 - DNA, 25 bp, Homo sapiens
gccttgccgcggtgaggaggaaagc

SEQ ID NO: 11270 - DNA, 25 bp, Homo sapiens
ccttgccgcggtgaggaggaaagcc

SEQ ID NO: 11271 - DNA, 25 bp, Homo sapiens
cttgccgcggtgaggaggaaagccc

SEQ ID NO: 11272 - DNA, 25 bp, Homo sapiens
ttgccgcggtgaggaggaaagcccc

SEQ ID NO: 11273 - DNA, 25 bp, Homo sapiens
tgccgcggtgaggaggaaagccccg

SEQ ID NO: 11274 - DNA, 25 bp, Homo sapiens
gccgcggtgaggaggaaagccccgt

SEQ ID NO: 11275 - DNA, 25 bp, Homo sapiens
ccgcggtgaggaggaaagccccgtg

SEQ ID NO: 11276 - DNA, 25 bp, Homo sapiens
cgcggtgaggaggaaagccccgtgc

SEQ ID NO: 11277 - DNA, 25 bp, Homo sapiens
gcggtgaggaggaaagccccgtgct

SEQ ID NO: 11278 - DNA, 25 bp, Homo sapiens
cggtgaggaggaaagccccgtgctc

SEQ ID NO: 11279 - DNA, 25 bp, Homo sapiens
ggtgaggaggaaagccccgtgctcc

SEQ ID NO: 11280 - DNA, 25 bp, Homo sapiens
gtgaggaggaaagccccgtgctccc

SEQ ID NO: 11281 - DNA, 25 bp, Homo sapiens
tgaggaggaaagccccgtgctccca

SEQ ID NO: 11282 - DNA, 25 bp, Homo sapiens
gaggaggaaagccccgtgctcccag

SEQ ID NO: 11283 - DNA, 25 bp, Homo sapiens
aggaggaaagccccgtgctcccaga

SEQ ID NO: 11284 - DNA, 25 bp, Homo sapiens
ggaggaaagccccgtgctcccagat

SEQ ID NO: 11285 - DNA, 25 bp, Homo sapiens
gaggaaagccccgtgctcccagatc

SEQ ID NO: 11286 - DNA, 25 bp, Homo sapiens
aggaaagccccgtgctcccagatca

SEQ ID NO: 11287 - DNA, 25 bp, Homo sapiens
ggaaagccccgtgctcccagatcaa

SEQ ID NO: 11288 - DNA, 25 bp, Homo sapiens
gaaagccccgtgctcccagatcaag

SEQ ID NO: 11289 - DNA, 25 bp, Homo sapiens
aaagccccgtgctcccagatcaagc

SEQ ID NO: 11290 - DNA, 25 bp, Homo sapiens
aagccccgtgctcccagatcaagct

SEQ ID NO: 11291 - DNA, 25 bp, Homo sapiens
agccccgtgctcccagatcaagctg

SEQ ID NO: 11292 - DNA, 25 bp, Homo sapiens
gccccgtgctcccagatcaagctgc

SEQ ID NO: 11293 - DNA, 25 bp, Homo sapiens
ccccgtgctcccagatcaagctgca

SEQ ID NO: 11294 - DNA, 25 bp, Homo sapiens
cccgtgctcccagatcaagctgcag

SEQ ID NO: 11295 - DNA, 25 bp, Homo sapiens
ccgtgctcccagatcaagctgcaga

SEQ ID NO: 11296 - DNA, 25 bp, Homo sapiens
cgtgctcccagatcaagctgcagat

SEQ ID NO: 11297 - DNA, 25 bp, Homo sapiens
gtgctcccagatcaagctgcagatg

SEQ ID NO: 11298 - DNA, 25 bp, Homo sapiens
tgctcccagatcaagctgcagatgg

SEQ ID NO: 11299 - DNA, 25 bp, Homo sapiens
gctcccagatcaagctgcagatgga

SEQ ID NO: 11300 - DNA, 25 bp, Homo sapiens
ctcccagatcaagctgcagatggat

SEQ ID NO: 11301 - DNA, 25 bp, Homo sapiens
tcccagatcaagctgcagatggatg

SEQ ID NO: 11302 - DNA, 25 bp, Homo sapiens
cccagatcaagctgcagatggatgc

SEQ ID NO: 11303 - DNA, 25 bp, Homo sapiens
ccagatcaagctgcagatggatgcg

SEQ ID NO: 11304 - DNA, 25 bp, Homo sapiens
cagatcaagctgcagatggatgcgc

SEQ ID NO: 11305 - DNA, 25 bp, Homo sapiens
agatcaagctgcagatggatgcgct

SEQ ID NO: 11306 - DNA, 25 bp, Homo sapiens
gatcaagctgcagatggatgcgctg

SEQ ID NO: 11307 - DNA, 25 bp, Homo sapiens
atcaagctgcagatggatgcgctga

SEQ ID NO: 11308 - DNA, 25 bp, Homo sapiens
tcaagctgcagatggatgcgctgac

SEQ ID NO: 11309 - DNA, 25 bp, Homo sapiens
caagctgcagatggatgcgctgacc

SEQ ID NO: 11310 - DNA, 25 bp, Homo sapiens
aagctgcagatggatgcgctgacca

SEQ ID NO: 11311 - DNA, 25 bp, Homo sapiens
agctgcagatggatgcgctgaccag

SEQ ID NO: 11312 - DNA, 25 bp, Homo sapiens
gctgcagatggatgcgctgaccagc

SEQ ID NO: 11313 - DNA, 25 bp, Homo sapiens
ctgcagatggatgcgctgaccagca

SEQ ID NO: 11314 - DNA, 25 bp, Homo sapiens
tgcagatggatgcgctgaccagcat

SEQ ID NO: 11315 - DNA, 25 bp, Homo sapiens
gcagatggatgcgctgaccagcatg

SEQ ID NO: 11316 - DNA, 25 bp, Homo sapiens
cagatggatgcgctgaccagcatga

SEQ ID NO: 11317 - DNA, 25 bp, Homo sapiens
agatggatgcgctgaccagcatgat

SEQ ID NO: 11318 - DNA, 25 bp, Homo sapiens
gatggatgcgctgaccagcatgatc

SEQ ID NO: 11319 - DNA, 25 bp, Homo sapiens
atggatgcgctgaccagcatgatca

SEQ ID NO: 11320 - DNA, 25 bp, Homo sapiens
tggatgcgctgaccagcatgatcaa

SEQ ID NO: 11321 - DNA, 25 bp, Homo sapiens
ggatgcgctgaccagcatgatcaaa

SEQ ID NO: 11322 - DNA, 25 bp, Homo sapiens
gatgcgctgaccagcatgatcaaaa

SEQ ID NO: 11323 - DNA, 25 bp, Homo sapiens
atgcgctgaccagcatgatcaaaag

SEQ ID NO: 11324 - DNA, 25 bp, Homo sapiens
tgcgctgaccagcatgatcaaaagg

SEQ ID NO: 11325 - DNA, 25 bp, Homo sapiens
gcgctgaccagcatgatcaaaaggt

SEQ ID NO: 11326 - DNA, 25 bp, Homo sapiens
cgctgaccagcatgatcaaaaggtc

SEQ ID NO: 11327 - DNA, 25 bp, Homo sapiens
gctgaccagcatgatcaaaaggtcc

SEQ ID NO: 11328 - DNA, 25 bp, Homo sapiens
ctgaccagcatgatcaaaaggtccc

SEQ ID NO: 11329 - DNA, 25 bp, Homo sapiens
tgaccagcatgatcaaaaggtcccg

SEQ ID NO: 11330 - DNA, 25 bp, Homo sapiens
gaccagcatgatcaaaaggtcccgg

SEQ ID NO: 11331 - DNA, 25 bp, Homo sapiens
accagcatgatcaaaaggtcccggc

SEQ ID NO: 11332 - DNA, 25 bp, Homo sapiens
ccagcatgatcaaaaggtcccggct

SEQ ID NO: 11333 - DNA, 25 bp, Homo sapiens
cagcatgatcaaaaggtcccggctg

SEQ ID NO: 11334 - DNA, 25 bp, Homo sapiens
agcatgatcaaaaggtcccggctgc

SEQ ID NO: 11335 - DNA, 25 bp, Homo sapiens
gcatgatcaaaaggtcccggctgca

SEQ ID NO: 11336 - DNA, 25 bp, Homo sapiens
catgatcaaaaggtcccggctgcac

SEQ ID NO: 11337 - DNA, 25 bp, Homo sapiens
atgatcaaaaggtcccggctgcact

SEQ ID NO: 11338 - DNA, 25 bp, Homo sapiens
tgatcaaaaggtcccggctgcactt

SEQ ID NO: 11339 - DNA, 25 bp, Homo sapiens
gatcaaaaggtcccggctgcacttt

SEQ ID NO: 11340 - DNA, 25 bp, Homo sapiens
atcaaaaggtcccggctgcacttta

SEQ ID NO: 11341 - DNA, 25 bp, Homo sapiens
tcaaaaggtcccggctgcactttat

SEQ ID NO: 11342 - DNA, 25 bp, Homo sapiens
caaaaggtcccggctgcactttatc

SEQ ID NO: 11343 - DNA, 25 bp, Homo sapiens
aaaaggtcccggctgcactttatcc

SEQ ID NO: 11344 - DNA, 25 bp, Homo sapiens
aaaggtcccggctgcactttatcca

SEQ ID NO: 11345 - DNA, 25 bp, Homo sapiens
aaggtcccggctgcactttatccac

SEQ ID NO: 11346 - DNA, 25 bp, Homo sapiens
aggtcccggctgcactttatccact

SEQ ID NO: 11347 - DNA, 25 bp, Homo sapiens
ggtcccggctgcactttatccactg

SEQ ID NO: 11348 - DNA, 25 bp, Homo sapiens
gtcccggctgcactttatccactgc

SEQ ID NO: 11349 - DNA, 25 bp, Homo sapiens
tcccggctgcactttatccactgcc

SEQ ID NO: 11350 - DNA, 25 bp, Homo sapiens
cccggctgcactttatccactgcct

SEQ ID NO: 11351 - DNA, 25 bp, Homo sapiens
ccggctgcactttatccactgcctg

SEQ ID NO: 11352 - DNA, 25 bp, Homo sapiens
cggctgcactttatccactgcctgg

SEQ ID NO: 11353 - DNA, 25 bp, Homo sapiens
ggctgcactttatccactgcctggt

SEQ ID NO: 11354 - DNA, 25 bp, Homo sapiens
gctgcactttatccactgcctggta

SEQ ID NO: 11355 - DNA, 25 bp, Homo sapiens
ctgcactttatccactgcctggtac

SEQ ID NO: 11356 - DNA, 25 bp, Homo sapiens
tgcactttatccactgcctggtacc

SEQ ID NO: 11357 - DNA, 25 bp, Homo sapiens
gcactttatccactgcctggtacca

SEQ ID NO: 11358 - DNA, 25 bp, Homo sapiens
cactttatccactgcctggtaccaa

SEQ ID NO: 11359 - DNA, 25 bp, Homo sapiens
actttatccactgcctggtaccaaa

SEQ ID NO: 11360 - DNA, 25 bp, Homo sapiens
ctttatccactgcctggtaccaaac

SEQ ID NO: 11361 - DNA, 25 bp, Homo sapiens
tttatccactgcctggtaccaaacc

SEQ ID NO: 11362 - DNA, 25 bp, Homo sapiens
ttatccactgcctggtaccaaaccc

SEQ ID NO: 11363 - DNA, 25 bp, Homo sapiens
tatccactgcctggtaccaaaccct

SEQ ID NO: 11364 - DNA, 25 bp, Homo sapiens
atccactgcctggtaccaaaccctg

SEQ ID NO: 11365 - DNA, 25 bp, Homo sapiens
tccactgcctggtaccaaaccctgt

SEQ ID NO: 11366 - DNA, 25 bp, Homo sapiens
ccactgcctggtaccaaaccctgtg

SEQ ID NO: 11367 - DNA, 25 bp, Homo sapiens
cactgcctggtaccaaaccctgtgg

SEQ ID NO: 11368 - DNA, 25 bp, Homo sapiens
actgcctggtaccaaaccctgtggt

SEQ ID NO: 11369 - DNA, 25 bp, Homo sapiens
ctgcctggtaccaaaccctgtggtg

SEQ ID NO: 11370 - DNA, 25 bp, Homo sapiens
tgcctggtaccaaaccctgtggtgg

SEQ ID NO: 11371 - DNA, 25 bp, Homo sapiens
gcctggtaccaaaccctgtggtgga

SEQ ID NO: 11372 - DNA, 25 bp, Homo sapiens
cctggtaccaaaccctgtggtggaa

SEQ ID NO: 11373 - DNA, 25 bp, Homo sapiens
ctggtaccaaaccctgtggtggaaa

SEQ ID NO: 11374 - DNA, 25 bp, Homo sapiens
tggtaccaaaccctgtggtggaaag

SEQ ID NO: 11375 - DNA, 25 bp, Homo sapiens
ggtaccaaaccctgtggtggaaagc

SEQ ID NO: 11376 - DNA, 25 bp, Homo sapiens
gtaccaaaccctgtggtggaaagca

SEQ ID NO: 11377 - DNA, 25 bp, Homo sapiens
taccaaaccctgtggtggaaagcag

SEQ ID NO: 11378 - DNA, 25 bp, Homo sapiens
accaaaccctgtggtggaaagcagg

SEQ ID NO: 11379 - DNA, 25 bp, Homo sapiens
ccaaaccctgtggtggaaagcagga

SEQ ID NO: 11380 - DNA, 25 bp, Homo sapiens
caaaccctgtggtggaaagcaggag

SEQ ID NO: 11381 - DNA, 25 bp, Homo sapiens
aaaccctgtggtggaaagcaggagt

SEQ ID NO: 11382 - DNA, 25 bp, Homo sapiens
aaccctgtggtggaaagcaggagtg

SEQ ID NO: 11383 - DNA, 25 bp, Homo sapiens
accctgtggtggaaagcaggagtgg

SEQ ID NO: 11384 - DNA, 25 bp, Homo sapiens
ccctgtggtggaaagcaggagtggg

SEQ ID NO: 11385 - DNA, 25 bp, Homo sapiens
cctgtggtggaaagcaggagtgggc

SEQ ID NO: 11386 - DNA, 25 bp, Homo sapiens
ctgtggtggaaagcaggagtgggca

SEQ ID NO: 11387 - DNA, 25 bp, Homo sapiens
tgtggtggaaagcaggagtgggcag

SEQ ID NO: 11388 - DNA, 25 bp, Homo sapiens
gtggtggaaagcaggagtgggcagg

SEQ ID NO: 11389 - DNA, 25 bp, Homo sapiens
tggtggaaagcaggagtgggcagga

SEQ ID NO: 11390 - DNA, 25 bp, Homo sapiens
ggtggaaagcaggagtgggcaggaa

SEQ ID NO: 11391 - DNA, 25 bp, Homo sapiens
gtggaaagcaggagtgggcaggaat

SEQ ID NO: 11392 - DNA, 25 bp, Homo sapiens
tggaaagcaggagtgggcaggaatc

SEQ ID NO: 11393 - DNA, 25 bp, Homo sapiens
ggaaagcaggagtgggcaggaatct

SEQ ID NO: 11394 - DNA, 25 bp, Homo sapiens
gaaagcaggagtgggcaggaatctc

SEQ ID NO: 11395 - DNA, 25 bp, Homo sapiens
aaagcaggagtgggcaggaatctcc

SEQ ID NO: 11396 - DNA, 25 bp, Homo sapiens
aagcaggagtgggcaggaatctcca

SEQ ID NO: 11397 - DNA, 25 bp, Homo sapiens
agcaggagtgggcaggaatctccac

SEQ ID NO: 11398 - DNA, 25 bp, Homo sapiens
gcaggagtgggcaggaatctccacc

SEQ ID NO: 11399 - DNA, 25 bp, Homo sapiens
caggagtgggcaggaatctccacca

SEQ ID NO: 11400 - DNA, 25 bp, Homo sapiens
aggagtgggcaggaatctccaccac

SEQ ID NO: 11401 - DNA, 25 bp, Homo sapiens
ggagtgggcaggaatctccaccacc

SEQ ID NO: 11402 - DNA, 25 bp, Homo sapiens
gagtgggcaggaatctccaccacca

SEQ ID NO: 11403 - DNA, 25 bp, Homo sapiens
agtgggcaggaatctccaccaccac

SEQ ID NO: 11404 - DNA, 25 bp, Homo sapiens
gtgggcaggaatctccaccaccacc

SEQ ID NO: 11405 - DNA, 25 bp, Homo sapiens
tgggcaggaatctccaccaccaccg

SEQ ID NO: 11406 - DNA, 25 bp, Homo sapiens
gggcaggaatctccaccaccaccgc

SEQ ID NO: 11407 - DNA, 25 bp, Homo sapiens
ggcaggaatctccaccaccaccgca

SEQ ID NO: 11408 - DNA, 25 bp, Homo sapiens
gcaggaatctccaccaccaccgcag

SEQ ID NO: 11409 - DNA, 25 bp, Homo sapiens
caggaatctccaccaccaccgcagc

SEQ ID NO: 11410 - DNA, 25 bp, Homo sapiens
aggaatctccaccaccaccgcagcc

SEQ ID NO: 11411 - DNA, 25 bp, Homo sapiens
ggaatctccaccaccaccgcagcct

SEQ ID NO: 11412 - DNA, 25 bp, Homo sapiens
gaatctccaccaccaccgcagcctg

SEQ ID NO: 11413 - DNA, 25 bp, Homo sapiens
aatctccaccaccaccgcagcctgg

SEQ ID NO: 11414 - DNA, 25 bp, Homo sapiens
atctccaccaccaccgcagcctggt

SEQ ID NO: 11415 - DNA, 25 bp, Homo sapiens
tctccaccaccaccgcagcctggta

SEQ ID NO: 11416 - DNA, 25 bp, Homo sapiens
ctccaccaccaccgcagcctggtag

SEQ ID NO: 11417 - DNA, 25 bp, Homo sapiens
tccaccaccaccgcagcctggtaga

SEQ ID NO: 11418 - DNA, 25 bp, Homo sapiens
ccaccaccaccgcagcctggtagag

SEQ ID NO: 11419 - DNA, 25 bp, Homo sapiens
caccaccaccgcagcctggtagaga

SEQ ID NO: 11420 - DNA, 25 bp, Homo sapiens
accaccaccgcagcctggtagagac

SEQ ID NO: 11421 - DNA, 25 bp, Homo sapiens
ccaccaccgcagcctggtagagaca

SEQ ID NO: 11422 - DNA, 25 bp, Homo sapiens
caccaccgcagcctggtagagacaa

SEQ ID NO: 11423 - DNA, 25 bp, Homo sapiens
accaccgcagcctggtagagacaag

SEQ ID NO: 11424 - DNA, 25 bp, Homo sapiens
ccaccgcagcctggtagagacaagc

SEQ ID NO: 11425 - DNA, 25 bp, Homo sapiens
caccgcagcctggtagagacaagcc

SEQ ID NO: 11426 - DNA, 25 bp, Homo sapiens
accgcagcctggtagagacaagcct

SEQ ID NO: 11427 - DNA, 25 bp, Homo sapiens
ccgcagcctggtagagacaagcctg

SEQ ID NO: 11428 - DNA, 25 bp, Homo sapiens
cgcagcctggtagagacaagcctgg

SEQ ID NO: 11429 - DNA, 25 bp, Homo sapiens
gcagcctggtagagacaagcctggg

SEQ ID NO: 11430 - DNA, 25 bp, Homo sapiens
cagcctggtagagacaagcctgggg

SEQ ID NO: 11431 - DNA, 25 bp, Homo sapiens
agcctggtagagacaagcctggggc

SEQ ID NO: 11432 - DNA, 25 bp, Homo sapiens
gcctggtagagacaagcctggggca

SEQ ID NO: 11433 - DNA, 25 bp, Homo sapiens
cctggtagagacaagcctggggcag

SEQ ID NO: 11434 - DNA, 25 bp, Homo sapiens
ctggtagagacaagcctggggcagg

SEQ ID NO: 11435 - DNA, 25 bp, Homo sapiens
tggtagagacaagcctggggcaggt

SEQ ID NO: 11436 - DNA, 25 bp, Homo sapiens
ggtagagacaagcctggggcaggtg

SEQ ID NO: 11437 - DNA, 25 bp, Homo sapiens
gtagagacaagcctggggcaggtgg

SEQ ID NO: 11438 - DNA, 25 bp, Homo sapiens
tagagacaagcctggggcaggtgga

SEQ ID NO: 11439 - DNA, 25 bp, Homo sapiens
agagacaagcctggggcaggtggac

SEQ ID NO: 11440 - DNA, 25 bp, Homo sapiens
gagacaagcctggggcaggtggacc

SEQ ID NO: 11441 - DNA, 25 bp, Homo sapiens
agacaagcctggggcaggtggacct

SEQ ID NO: 11442 - DNA, 25 bp, Homo sapiens
gacaagcctggggcaggtggacctc

SEQ ID NO: 11443 - DNA, 25 bp, Homo sapiens
acaagcctggggcaggtggacctct

SEQ ID NO: 11444 - DNA, 25 bp, Homo sapiens
caagcctggggcaggtggacctctg

SEQ ID NO: 11445 - DNA, 25 bp, Homo sapiens
aagcctggggcaggtggacctctgg

SEQ ID NO: 11446 - DNA, 25 bp, Homo sapiens
agcctggggcaggtggacctctggc

SEQ ID NO: 11447 - DNA, 25 bp, Homo sapiens
gcctggggcaggtggacctctggcc

SEQ ID NO: 11448 - DNA, 25 bp, Homo sapiens
cctggggcaggtggacctctggccc

SEQ ID NO: 11449 - DNA, 25 bp, Homo sapiens
ctggggcaggtggacctctggccct

SEQ ID NO: 11450 - DNA, 25 bp, Homo sapiens
tggggcaggtggacctctggccctg

SEQ ID NO: 11451 - DNA, 25 bp, Homo sapiens
ggggcaggtggacctctggccctgg

SEQ ID NO: 11452 - DNA, 25 bp, Homo sapiens
gggcaggtggacctctggccctgga

SEQ ID NO: 11453 - DNA, 25 bp, Homo sapiens
ggcaggtggacctctggccctggat

SEQ ID NO: 11454 - DNA, 25 bp, Homo sapiens
gcaggtggacctctggccctggata

SEQ ID NO: 11455 - DNA, 25 bp, Homo sapiens
caggtggacctctggccctggatat

SEQ ID NO: 11456 - DNA, 25 bp, Homo sapiens
aggtggacctctggccctggatatc

SEQ ID NO: 11457 - DNA, 25 bp, Homo sapiens
ggtggacctctggccctggatatcc

SEQ ID NO: 11458 - DNA, 25 bp, Homo sapiens
gtggacctctggccctggatatccc

SEQ ID NO: 11459 - DNA, 25 bp, Homo sapiens
tggacctctggccctggatatccca

SEQ ID NO: 11460 - DNA, 25 bp, Homo sapiens
ggacctctggccctggatatcccag

SEQ ID NO: 11461 - DNA, 25 bp, Homo sapiens
gacctctggccctggatatcccagc

SEQ ID NO: 11462 - DNA, 25 bp, Homo sapiens
acctctggccctggatatcccagca

SEQ ID NO: 11463 - DNA, 25 bp, Homo sapiens
cctctggccctggatatcccagcac

SEQ ID NO: 11464 - DNA, 25 bp, Homo sapiens
ctctggccctggatatcccagcact

SEQ ID NO: 11465 - DNA, 25 bp, Homo sapiens
tctggccctggatatcccagcactg

SEQ ID NO: 11466 - DNA, 25 bp, Homo sapiens
ctggccctggatatcccagcactga

SEQ ID NO: 11467 - DNA, 25 bp, Homo sapiens
tggccctggatatcccagcactgag

SEQ ID NO: 11468 - DNA, 25 bp, Homo sapiens
ggccctggatatcccagcactgagg

SEQ ID NO: 11469 - DNA, 25 bp, Homo sapiens
gccctggatatcccagcactgaggg

SEQ ID NO: 11470 - DNA, 25 bp, Homo sapiens
ccctggatatcccagcactgagggt

SEQ ID NO: 11471 - DNA, 25 bp, Homo sapiens
cctggatatcccagcactgagggtc

SEQ ID NO: 11472 - DNA, 25 bp, Homo sapiens
ctggatatcccagcactgagggtcc

SEQ ID NO: 11473 - DNA, 25 bp, Homo sapiens
tggatatcccagcactgagggtcca

SEQ ID NO: 11474 - DNA, 25 bp, Homo sapiens
ggatatcccagcactgagggtccag

SEQ ID NO: 11475 - DNA, 25 bp, Homo sapiens
gatatcccagcactgagggtccagc

SEQ ID NO: 11476 - DNA, 25 bp, Homo sapiens
atatcccagcactgagggtccagct

SEQ ID NO: 11477 - DNA, 25 bp, Homo sapiens
tatcccagcactgagggtccagctt

SEQ ID NO: 11478 - DNA, 25 bp, Homo sapiens
atcccagcactgagggtccagcttg

SEQ ID NO: 11479 - DNA, 25 bp, Homo sapiens
tcccagcactgagggtccagcttgc

SEQ ID NO: 11480 - DNA, 25 bp, Homo sapiens
cccagcactgagggtccagcttgct

SEQ ID NO: 11481 - DNA, 25 bp, Homo sapiens
ccagcactgagggtccagcttgctg

SEQ ID NO: 11482 - DNA, 25 bp, Homo sapiens
cagcactgagggtccagcttgctgg

SEQ ID NO: 11483 - DNA, 25 bp, Homo sapiens
agcactgagggtccagcttgctggg

SEQ ID NO: 11484 - DNA, 25 bp, Homo sapiens
gcactgagggtccagcttgctgggt

SEQ ID NO: 11485 - DNA, 25 bp, Homo sapiens
cactgagggtccagcttgctgggtt

SEQ ID NO: 11486 - DNA, 25 bp, Homo sapiens
actgagggtccagcttgctgggttc

SEQ ID NO: 11487 - DNA, 25 bp, Homo sapiens
ctgagggtccagcttgctgggttcc

SEQ ID NO: 11488 - DNA, 25 bp, Homo sapiens
tgagggtccagcttgctgggttcca

SEQ ID NO: 11489 - DNA, 25 bp, Homo sapiens
gagggtccagcttgctgggttccac

SEQ ID NO: 11490 - DNA, 25 bp, Homo sapiens
agggtccagcttgctgggttccaca

SEQ ID NO: 11491 - DNA, 25 bp, Homo sapiens
gggtccagcttgctgggttccacat

SEQ ID NO: 11492 - DNA, 25 bp, Homo sapiens
ggtccagcttgctgggttccacatc

SEQ ID NO: 11493 - DNA, 25 bp, Homo sapiens
gtccagcttgctgggttccacatcc

SEQ ID NO: 11494 - DNA, 25 bp, Homo sapiens
tccagcttgctgggttccacatcct

SEQ ID NO: 11495 - DNA, 25 bp, Homo sapiens
ccagcttgctgggttccacatcctg

SEQ ID NO: 11496 - DNA, 25 bp, Homo sapiens
cagcttgctgggttccacatcctgg

SEQ ID NO: 11497 - DNA, 25 bp, Homo sapiens
agcttgctgggttccacatcctgga

SEQ ID NO: 11498 - DNA, 25 bp, Homo sapiens
gcttgctgggttccacatcctggag

SEQ ID NO: 11499 - DNA, 25 bp, Homo sapiens
cttgctgggttccacatcctggagg

SEQ ID NO: 11500 - DNA, 25 bp, Homo sapiens
ttgctgggttccacatcctggaggc

SEQ ID NO: 11501 - DNA, 25 bp, Homo sapiens
tgctgggttccacatcctggaggct

SEQ ID NO: 11502 - DNA, 25 bp, Homo sapiens
gctgggttccacatcctggaggctc

SEQ ID NO: 11503 - DNA, 25 bp, Homo sapiens
ctgggttccacatcctggaggctct

SEQ ID NO: 11504 - DNA, 25 bp, Homo sapiens
tgggttccacatcctggaggctctg

SEQ ID NO: 11505 - DNA, 25 bp, Homo sapiens
gggttccacatcctggaggctctgc

SEQ ID NO: 11506 - DNA, 25 bp, Homo sapiens
ggttccacatcctggaggctctgcg

SEQ ID NO: 11507 - DNA, 25 bp, Homo sapiens
gttccacatcctggaggctctgcgt

SEQ ID NO: 11508 - DNA, 25 bp, Homo sapiens
ttccacatcctggaggctctgcgtc

SEQ ID NO: 11509 - DNA, 25 bp, Homo sapiens
tccacatcctggaggctctgcgtct

SEQ ID NO: 11510 - DNA, 25 bp, Homo sapiens
ccacatcctggaggctctgcgtctg

SEQ ID NO: 11511 - DNA, 25 bp, Homo sapiens
cacatcctggaggctctgcgtctgc

SEQ ID NO: 11512 - DNA, 25 bp, Homo sapiens
acatcctggaggctctgcgtctgca

SEQ ID NO: 11513 - DNA, 25 bp, Homo sapiens
catcctggaggctctgcgtctgcat

SEQ ID NO: 11514 - DNA, 25 bp, Homo sapiens
atcctggaggctctgcgtctgcata

SEQ ID NO: 11515 - DNA, 25 bp, Homo sapiens
tcctggaggctctgcgtctgcatag

SEQ ID NO: 11516 - DNA, 25 bp, Homo sapiens
cctggaggctctgcgtctgcatagg

SEQ ID NO: 11517 - DNA, 25 bp, Homo sapiens
ctggaggctctgcgtctgcatagga

SEQ ID NO: 11518 - DNA, 25 bp, Homo sapiens
tggaggctctgcgtctgcataggac

SEQ ID NO: 11519 - DNA, 25 bp, Homo sapiens
ggaggctctgcgtctgcataggaca

SEQ ID NO: 11520 - DNA, 25 bp, Homo sapiens
gaggctctgcgtctgcataggacag

SEQ ID NO: 11521 - DNA, 25 bp, Homo sapiens
aggctctgcgtctgcataggacagg

SEQ ID NO: 11522 - DNA, 25 bp, Homo sapiens
ggctctgcgtctgcataggacaggc

SEQ ID NO: 11523 - DNA, 25 bp, Homo sapiens
gctctgcgtctgcataggacaggct

SEQ ID NO: 11524 - DNA, 25 bp, Homo sapiens
ctctgcgtctgcataggacaggcta

SEQ ID NO: 11525 - DNA, 25 bp, Homo sapiens
tctgcgtctgcataggacaggctat

SEQ ID NO: 11526 - DNA, 25 bp, Homo sapiens
ctgcgtctgcataggacaggctatg

SEQ ID NO: 11527 - DNA, 25 bp, Homo sapiens
tgcgtctgcataggacaggctatgc

SEQ ID NO: 11528 - DNA, 25 bp, Homo sapiens
gcgtctgcataggacaggctatgct

SEQ ID NO: 11529 - DNA, 25 bp, Homo sapiens
cgtctgcataggacaggctatgctg

SEQ ID NO: 11530 - DNA, 25 bp, Homo sapiens
gtctgcataggacaggctatgctga

SEQ ID NO: 11531 - DNA, 25 bp, Homo sapiens
tctgcataggacaggctatgctgac

SEQ ID NO: 11532 - DNA, 25 bp, Homo sapiens
ctgcataggacaggctatgctgacc

SEQ ID NO: 11533 - DNA, 25 bp, Homo sapiens
tgcataggacaggctatgctgacca

SEQ ID NO: 11534 - DNA, 25 bp, Homo sapiens
gcataggacaggctatgctgaccac

SEQ ID NO: 11535 - DNA, 25 bp, Homo sapiens
cataggacaggctatgctgaccaca

SEQ ID NO: 11536 - DNA, 25 bp, Homo sapiens
ataggacaggctatgctgaccacat

SEQ ID NO: 11537 - DNA, 25 bp, Homo sapiens
taggacaggctatgctgaccacatg

SEQ ID NO: 11538 - DNA, 25 bp, Homo sapiens
aggacaggctatgctgaccacatgg

SEQ ID NO: 11539 - DNA, 25 bp, Homo sapiens
ggacaggctatgctgaccacatggg

SEQ ID NO: 11540 - DNA, 25 bp, Homo sapiens
gacaggctatgctgaccacatgggg

SEQ ID NO: 11541 - DNA, 25 bp, Homo sapiens
acaggctatgctgaccacatggggc

SEQ ID NO: 11542 - DNA, 25 bp, Homo sapiens
caggctatgctgaccacatggggct

SEQ ID NO: 11543 - DNA, 25 bp, Homo sapiens
aggctatgctgaccacatggggctc

SEQ ID NO: 11544 - DNA, 25 bp, Homo sapiens
ggctatgctgaccacatggggctca

SEQ ID NO: 11545 - DNA, 25 bp, Homo sapiens
gctatgctgaccacatggggctcac

SEQ ID NO: 11546 - DNA, 25 bp, Homo sapiens
ctatgctgaccacatggggctcact

SEQ ID NO: 11547 - DNA, 25 bp, Homo sapiens
tatgctgaccacatggggctcactc

SEQ ID NO: 11548 - DNA, 25 bp, Homo sapiens
atgctgaccacatggggctcactcg

SEQ ID NO: 11549 - DNA, 25 bp, Homo sapiens
tgctgaccacatggggctcactcgc

SEQ ID NO: 11550 - DNA, 25 bp, Homo sapiens
gctgaccacatggggctcactcgct

SEQ ID NO: 11551 - DNA, 25 bp, Homo sapiens
ctgaccacatggggctcactcgctt

SEQ ID NO: 11552 - DNA, 25 bp, Homo sapiens
tgaccacatggggctcactcgcttc

SEQ ID NO: 11553 - DNA, 25 bp, Homo sapiens
gaccacatggggctcactcgcttcc

SEQ ID NO: 11554 - DNA, 25 bp, Homo sapiens
accacatggggctcactcgcttccg

SEQ ID NO: 11555 - DNA, 25 bp, Homo sapiens
ccacatggggctcactcgcttccgc

SEQ ID NO: 11556 - DNA, 25 bp, Homo sapiens
cacatggggctcactcgcttccgcc

SEQ ID NO: 11557 - DNA, 25 bp, Homo sapiens
acatggggctcactcgcttccgccg

SEQ ID NO: 11558 - DNA, 25 bp, Homo sapiens
catggggctcactcgcttccgccgg

SEQ ID NO: 11559 - DNA, 25 bp, Homo sapiens
atggggctcactcgcttccgccggc

SEQ ID NO: 11560 - DNA, 25 bp, Homo sapiens
tggggctcactcgcttccgccggca

SEQ ID NO: 11561 - DNA, 25 bp, Homo sapiens
ggggctcactcgcttccgccggcaa

SEQ ID NO: 11562 - DNA, 25 bp, Homo sapiens
gggctcactcgcttccgccggcaat

SEQ ID NO: 11563 - DNA, 25 bp, Homo sapiens
ggctcactcgcttccgccggcaatt

SEQ ID NO: 11564 - DNA, 25 bp, Homo sapiens
gctcactcgcttccgccggcaattc

SEQ ID NO: 11565 - DNA, 25 bp, Homo sapiens
ctcactcgcttccgccggcaattcc

SEQ ID NO: 11566 - DNA, 25 bp, Homo sapiens
tcactcgcttccgccggcaattcca

SEQ ID NO: 11567 - DNA, 25 bp, Homo sapiens
cactcgcttccgccggcaattccag

SEQ ID NO: 11568 - DNA, 25 bp, Homo sapiens
actcgcttccgccggcaattccagg

SEQ ID NO: 11569 - DNA, 25 bp, Homo sapiens
ctcgcttccgccggcaattccaggt

SEQ ID NO: 11570 - DNA, 25 bp, Homo sapiens
tcgcttccgccggcaattccaggtg

SEQ ID NO: 11571 - DNA, 25 bp, Homo sapiens
cgcttccgccggcaattccaggtgc

SEQ ID NO: 11572 - DNA, 25 bp, Homo sapiens
gcttccgccggcaattccaggtgct

SEQ ID NO: 11573 - DNA, 25 bp, Homo sapiens
cttccgccggcaattccaggtgctg

SEQ ID NO: 11574 - DNA, 25 bp, Homo sapiens
ttccgccggcaattccaggtgctgg

SEQ ID NO: 11575 - DNA, 25 bp, Homo sapiens
tccgccggcaattccaggtgctgga

SEQ ID NO: 11576 - DNA, 25 bp, Homo sapiens
ccgccggcaattccaggtgctggac

SEQ ID NO: 11577 - DNA, 25 bp, Homo sapiens
cgccggcaattccaggtgctggacg

SEQ ID NO: 11578 - DNA, 25 bp, Homo sapiens
gccggcaattccaggtgctggacgc

SEQ ID NO: 11579 - DNA, 25 bp, Homo sapiens
ccggcaattccaggtgctggacgct

SEQ ID NO: 11580 - DNA, 25 bp, Homo sapiens
cggcaattccaggtgctggacgctc

SEQ ID NO: 11581 - DNA, 25 bp, Homo sapiens
ggcaattccaggtgctggacgctcc

SEQ ID NO: 11582 - DNA, 25 bp, Homo sapiens
gcaattccaggtgctggacgctcca

SEQ ID NO: 11583 - DNA, 25 bp, Homo sapiens
caattccaggtgctggacgctccac

SEQ ID NO: 11584 - DNA, 25 bp, Homo sapiens
aattccaggtgctggacgctccact

SEQ ID NO: 11585 - DNA, 25 bp, Homo sapiens
attccaggtgctggacgctccactc

SEQ ID NO: 11586 - DNA, 25 bp, Homo sapiens
ttccaggtgctggacgctccactcc

SEQ ID NO: 11587 - DNA, 25 bp, Homo sapiens
tccaggtgctggacgctccactcct

SEQ ID NO: 11588 - DNA, 25 bp, Homo sapiens
ccaggtgctggacgctccactcctg

SEQ ID NO: 11589 - DNA, 25 bp, Homo sapiens
caggtgctggacgctccactcctga

SEQ ID NO: 11590 - DNA, 25 bp, Homo sapiens
aggtgctggacgctccactcctgaa

SEQ ID NO: 11591 - DNA, 25 bp, Homo sapiens
ggtgctggacgctccactcctgaag

SEQ ID NO: 11592 - DNA, 25 bp, Homo sapiens
gtgctggacgctccactcctgaaga

SEQ ID NO: 11593 - DNA, 25 bp, Homo sapiens
tgctggacgctccactcctgaagaa

SEQ ID NO: 11594 - DNA, 25 bp, Homo sapiens
gctggacgctccactcctgaagaag

SEQ ID NO: 11595 - DNA, 25 bp, Homo sapiens
ctggacgctccactcctgaagaagc

SEQ ID NO: 11596 - DNA, 25 bp, Homo sapiens
tggacgctccactcctgaagaagct

SEQ ID NO: 11597 - DNA, 25 bp, Homo sapiens
ggacgctccactcctgaagaagctc

SEQ ID NO: 11598 - DNA, 25 bp, Homo sapiens
gacgctccactcctgaagaagctca

SEQ ID NO: 11599 - DNA, 25 bp, Homo sapiens
acgctccactcctgaagaagctcat

SEQ ID NO: 11600 - DNA, 25 bp, Homo sapiens
cgctccactcctgaagaagctcatg

SEQ ID NO: 11601 - DNA, 25 bp, Homo sapiens
gctccactcctgaagaagctcatgt

SEQ ID NO: 11602 - DNA, 25 bp, Homo sapiens
ctccactcctgaagaagctcatgtc

SEQ ID NO: 11603 - DNA, 25 bp, Homo sapiens
tccactcctgaagaagctcatgtcg

SEQ ID NO: 11604 - DNA, 25 bp, Homo sapiens
ccactcctgaagaagctcatgtcga

SEQ ID NO: 11605 - DNA, 25 bp, Homo sapiens
cactcctgaagaagctcatgtcgac

SEQ ID NO: 11606 - DNA, 25 bp, Homo sapiens
actcctgaagaagctcatgtcgacc

SEQ ID NO: 11607 - DNA, 25 bp, Homo sapiens
ctcctgaagaagctcatgtcgacct

SEQ ID NO: 11608 - DNA, 25 bp, Homo sapiens
tcctgaagaagctcatgtcgacctc

SEQ ID NO: 11609 - DNA, 25 bp, Homo sapiens
cctgaagaagctcatgtcgacctcc

SEQ ID NO: 11610 - DNA, 25 bp, Homo sapiens
ctgaagaagctcatgtcgacctccg

SEQ ID NO: 11611 - DNA, 25 bp, Homo sapiens
tgaagaagctcatgtcgacctccga

SEQ ID NO: 11612 - DNA, 25 bp, Homo sapiens
gaagaagctcatgtcgacctccgag

SEQ ID NO: 11613 - DNA, 25 bp, Homo sapiens
aagaagctcatgtcgacctccgagg

SEQ ID NO: 11614 - DNA, 25 bp, Homo sapiens
agaagctcatgtcgacctccgaggg

SEQ ID NO: 11615 - DNA, 25 bp, Homo sapiens
gaagctcatgtcgacctccgaggga

SEQ ID NO: 11616 - DNA, 25 bp, Homo sapiens
aagctcatgtcgacctccgagggaa

SEQ ID NO: 11617 - DNA, 25 bp, Homo sapiens
agctcatgtcgacctccgagggaat

SEQ ID NO: 11618 - DNA, 25 bp, Homo sapiens
gctcatgtcgacctccgagggaata

SEQ ID NO: 11619 - DNA, 25 bp, Homo sapiens
ctcatgtcgacctccgagggaatag

SEQ ID NO: 11620 - DNA, 25 bp, Homo sapiens
tcatgtcgacctccgagggaataga

SEQ ID NO: 11621 - DNA, 25 bp, Homo sapiens
catgtcgacctccgagggaatagat

SEQ ID NO: 11622 - DNA, 25 bp, Homo sapiens
atgtcgacctccgagggaatagatg

SEQ ID NO: 11623 - DNA, 25 bp, Homo sapiens
tgtcgacctccgagggaatagatga

SEQ ID NO: 11624 - DNA, 25 bp, Homo sapiens
gtcgacctccgagggaatagatgaa

SEQ ID NO: 11625 - DNA, 25 bp, Homo sapiens
tcgacctccgagggaatagatgaaa

SEQ ID NO: 11626 - DNA, 25 bp, Homo sapiens
cgacctccgagggaatagatgaaag

SEQ ID NO: 11627 - DNA, 25 bp, Homo sapiens
gacctccgagggaatagatgaaagg

SEQ ID NO: 11628 - DNA, 25 bp, Homo sapiens
acctccgagggaatagatgaaagga

SEQ ID NO: 11629 - DNA, 25 bp, Homo sapiens
cctccgagggaatagatgaaaggaa

SEQ ID NO: 11630 - DNA, 25 bp, Homo sapiens
ctccgagggaatagatgaaaggaag

SEQ ID NO: 11631 - DNA, 25 bp, Homo sapiens
tccgagggaatagatgaaaggaagg

SEQ ID NO: 11632 - DNA, 25 bp, Homo sapiens
ccgagggaatagatgaaaggaaggc

SEQ ID NO: 11633 - DNA, 25 bp, Homo sapiens
cgagggaatagatgaaaggaaggcc

SEQ ID NO: 11634 - DNA, 25 bp, Homo sapiens
gagggaatagatgaaaggaaggccg

SEQ ID NO: 11635 - DNA, 25 bp, Homo sapiens
agggaatagatgaaaggaaggccgt

SEQ ID NO: 11636 - DNA, 25 bp, Homo sapiens
gggaatagatgaaaggaaggccgtg

SEQ ID NO: 11637 - DNA, 25 bp, Homo sapiens
ggaatagatgaaaggaaggccgtgg

SEQ ID NO: 11638 - DNA, 25 bp, Homo sapiens
gaatagatgaaaggaaggccgtgga

SEQ ID NO: 11639 - DNA, 25 bp, Homo sapiens
aatagatgaaaggaaggccgtggag

SEQ ID NO: 11640 - DNA, 25 bp, Homo sapiens
atagatgaaaggaaggccgtggagg

SEQ ID NO: 11641 - DNA, 25 bp, Homo sapiens
tagatgaaaggaaggccgtggagga

SEQ ID NO: 11642 - DNA, 25 bp, Homo sapiens
agatgaaaggaaggccgtggaggag

SEQ ID NO: 11643 - DNA, 25 bp, Homo sapiens
gatgaaaggaaggccgtggaggagc

SEQ ID NO: 11644 - DNA, 25 bp, Homo sapiens
atgaaaggaaggccgtggaggagct

SEQ ID NO: 11645 - DNA, 25 bp, Homo sapiens
tgaaaggaaggccgtggaggagctc

SEQ ID NO: 11646 - DNA, 25 bp, Homo sapiens
gaaaggaaggccgtggaggagctcc

SEQ ID NO: 11647 - DNA, 25 bp, Homo sapiens
aaaggaaggccgtggaggagctcct

SEQ ID NO: 11648 - DNA, 25 bp, Homo sapiens
aaggaaggccgtggaggagctcctg

SEQ ID NO: 11649 - DNA, 25 bp, Homo sapiens
aggaaggccgtggaggagctcctgg

SEQ ID NO: 11650 - DNA, 25 bp, Homo sapiens
ggaaggccgtggaggagctcctgga

SEQ ID NO: 11651 - DNA, 25 bp, Homo sapiens
gaaggccgtggaggagctcctggag

SEQ ID NO: 11652 - DNA, 25 bp, Homo sapiens
aaggccgtggaggagctcctggaga

SEQ ID NO: 11653 - DNA, 25 bp, Homo sapiens
aggccgtggaggagctcctggagac

SEQ ID NO: 11654 - DNA, 25 bp, Homo sapiens
ggccgtggaggagctcctggagacc

SEQ ID NO: 11655 - DNA, 25 bp, Homo sapiens
gccgtggaggagctcctggagaccc

SEQ ID NO: 11656 - DNA, 25 bp, Homo sapiens
ccgtggaggagctcctggagaccct

SEQ ID NO: 11657 - DNA, 25 bp, Homo sapiens
cgtggaggagctcctggagaccctg

SEQ ID NO: 11658 - DNA, 25 bp, Homo sapiens
gtggaggagctcctggagaccctgg

SEQ ID NO: 11659 - DNA, 25 bp, Homo sapiens
tggaggagctcctggagaccctgga

SEQ ID NO: 11660 - DNA, 25 bp, Homo sapiens
ggaggagctcctggagaccctggat

SEQ ID NO: 11661 - DNA, 25 bp, Homo sapiens
gaggagctcctggagaccctggatc

SEQ ID NO: 11662 - DNA, 25 bp, Homo sapiens
aggagctcctggagaccctggatct

SEQ ID NO: 11663 - DNA, 25 bp, Homo sapiens
ggagctcctggagaccctggatctg

SEQ ID NO: 11664 - DNA, 25 bp, Homo sapiens
gagctcctggagaccctggatctgg

SEQ ID NO: 11665 - DNA, 25 bp, Homo sapiens
agctcctggagaccctggatctgga

SEQ ID NO: 11666 - DNA, 25 bp, Homo sapiens
gctcctggagaccctggatctggaa

SEQ ID NO: 11667 - DNA, 25 bp, Homo sapiens
ctcctggagaccctggatctggaaa

SEQ ID NO: 11668 - DNA, 25 bp, Homo sapiens
tcctggagaccctggatctggaaaa

SEQ ID NO: 11669 - DNA, 25 bp, Homo sapiens
cctggagaccctggatctggaaaag

SEQ ID NO: 11670 - DNA, 25 bp, Homo sapiens
ctggagaccctggatctggaaaaga

SEQ ID NO: 11671 - DNA, 25 bp, Homo sapiens
tggagaccctggatctggaaaagaa

SEQ ID NO: 11672 - DNA, 25 bp, Homo sapiens
ggagaccctggatctggaaaagaag

SEQ ID NO: 11673 - DNA, 25 bp, Homo sapiens
gagaccctggatctggaaaagaagg

SEQ ID NO: 11674 - DNA, 25 bp, Homo sapiens
agaccctggatctggaaaagaaggc

SEQ ID NO: 11675 - DNA, 25 bp, Homo sapiens
gaccctggatctggaaaagaaggcg

SEQ ID NO: 11676 - DNA, 25 bp, Homo sapiens
accctggatctggaaaagaaggcgg

SEQ ID NO: 11677 - DNA, 25 bp, Homo sapiens
ccctggatctggaaaagaaggcggt

SEQ ID NO: 11678 - DNA, 25 bp, Homo sapiens
cctggatctggaaaagaaggcggtg

SEQ ID NO: 11679 - DNA, 25 bp, Homo sapiens
ctggatctggaaaagaaggcggtgg

SEQ ID NO: 11680 - DNA, 25 bp, Homo sapiens
tggatctggaaaagaaggcggtggc

SEQ ID NO: 11681 - DNA, 25 bp, Homo sapiens
ggatctggaaaagaaggcggtggct

SEQ ID NO: 11682 - DNA, 25 bp, Homo sapiens
gatctggaaaagaaggcggtggctg

SEQ ID NO: 11683 - DNA, 25 bp, Homo sapiens
atctggaaaagaaggcggtggctgt

SEQ ID NO: 11684 - DNA, 25 bp, Homo sapiens
tctggaaaagaaggcggtggctgtg

SEQ ID NO: 11685 - DNA, 25 bp, Homo sapiens
ctggaaaagaaggcggtggctgtgg

SEQ ID NO: 11686 - DNA, 25 bp, Homo sapiens
tggaaaagaaggcggtggctgtggg

SEQ ID NO: 11687 - DNA, 25 bp, Homo sapiens
ggaaaagaaggcggtggctgtgggg

SEQ ID NO: 11688 - DNA, 25 bp, Homo sapiens
gaaaagaaggcggtggctgtggggc

SEQ ID NO: 11689 - DNA, 25 bp, Homo sapiens
aaaagaaggcggtggctgtggggca

SEQ ID NO: 11690 - DNA, 25 bp, Homo sapiens
aaagaaggcggtggctgtggggcac

SEQ ID NO: 11691 - DNA, 25 bp, Homo sapiens
aagaaggcggtggctgtggggcaca

SEQ ID NO: 11692 - DNA, 25 bp, Homo sapiens
agaaggcggtggctgtggggcacag

SEQ ID NO: 11693 - DNA, 25 bp, Homo sapiens
gaaggcggtggctgtggggcacagc

SEQ ID NO: 11694 - DNA, 25 bp, Homo sapiens
aaggcggtggctgtggggcacagcc

SEQ ID NO: 11695 - DNA, 25 bp, Homo sapiens
aggcggtggctgtggggcacagcca

SEQ ID NO: 11696 - DNA, 25 bp, Homo sapiens
ggcggtggctgtggggcacagccaa

SEQ ID NO: 11697 - DNA, 25 bp, Homo sapiens
gcggtggctgtggggcacagccaag

SEQ ID NO: 11698 - DNA, 25 bp, Homo sapiens
cggtggctgtggggcacagccaagt

SEQ ID NO: 11699 - DNA, 25 bp, Homo sapiens
ggtggctgtggggcacagccaagtt

SEQ ID NO: 11700 - DNA, 25 bp, Homo sapiens
gtggctgtggggcacagccaagttt

SEQ ID NO: 11701 - DNA, 25 bp, Homo sapiens
tggctgtggggcacagccaagtttt

SEQ ID NO: 11702 - DNA, 25 bp, Homo sapiens
ggctgtggggcacagccaagttttt

SEQ ID NO: 11703 - DNA, 25 bp, Homo sapiens
gctgtggggcacagccaagtttttc

SEQ ID NO: 11704 - DNA, 25 bp, Homo sapiens
ctgtggggcacagccaagtttttct

SEQ ID NO: 11705 - DNA, 25 bp, Homo sapiens
tgtggggcacagccaagtttttctc

SEQ ID NO: 11706 - DNA, 25 bp, Homo sapiens
gtggggcacagccaagtttttctca

SEQ ID NO: 11707 - DNA, 25 bp, Homo sapiens
tggggcacagccaagtttttctcaa

SEQ ID NO: 11708 - DNA, 25 bp, Homo sapiens
ggggcacagccaagtttttctcaag

SEQ ID NO: 11709 - DNA, 25 bp, Homo sapiens
gggcacagccaagtttttctcaagg

SEQ ID NO: 11710 - DNA, 25 bp, Homo sapiens
ggcacagccaagtttttctcaaggc

SEQ ID NO: 11711 - DNA, 25 bp, Homo sapiens
gcacagccaagtttttctcaaggca

SEQ ID NO: 11712 - DNA, 25 bp, Homo sapiens
cacagccaagtttttctcaaggcag

SEQ ID NO: 11713 - DNA, 25 bp, Homo sapiens
acagccaagtttttctcaaggcagg

SEQ ID NO: 11714 - DNA, 25 bp, Homo sapiens
cagccaagtttttctcaaggcaggt

SEQ ID NO: 11715 - DNA, 25 bp, Homo sapiens
agccaagtttttctcaaggcaggtg

SEQ ID NO: 11716 - DNA, 25 bp, Homo sapiens
gccaagtttttctcaaggcaggtgt

SEQ ID NO: 11717 - DNA, 25 bp, Homo sapiens
ccaagtttttctcaaggcaggtgtg

SEQ ID NO: 11718 - DNA, 25 bp, Homo sapiens
caagtttttctcaaggcaggtgtga

SEQ ID NO: 11719 - DNA, 25 bp, Homo sapiens
aagtttttctcaaggcaggtgtgat

SEQ ID NO: 11720 - DNA, 25 bp, Homo sapiens
agtttttctcaaggcaggtgtgatc

SEQ ID NO: 11721 - DNA, 25 bp, Homo sapiens
gtttttctcaaggcaggtgtgatct

SEQ ID NO: 11722 - DNA, 25 bp, Homo sapiens
tttttctcaaggcaggtgtgatctc

SEQ ID NO: 11723 - DNA, 25 bp, Homo sapiens
ttttctcaaggcaggtgtgatctcc

SEQ ID NO: 11724 - DNA, 25 bp, Homo sapiens
tttctcaaggcaggtgtgatctcca

SEQ ID NO: 11725 - DNA, 25 bp, Homo sapiens
ttctcaaggcaggtgtgatctccag

SEQ ID NO: 11726 - DNA, 25 bp, Homo sapiens
tctcaaggcaggtgtgatctccagg

SEQ ID NO: 11727 - DNA, 25 bp, Homo sapiens
ctcaaggcaggtgtgatctccaggc

SEQ ID NO: 11728 - DNA, 25 bp, Homo sapiens
tcaaggcaggtgtgatctccaggct

SEQ ID NO: 11729 - DNA, 25 bp, Homo sapiens
caaggcaggtgtgatctccaggctt

SEQ ID NO: 11730 - DNA, 25 bp, Homo sapiens
aaggcaggtgtgatctccaggcttg

SEQ ID NO: 11731 - DNA, 25 bp, Homo sapiens
aggcaggtgtgatctccaggcttga

SEQ ID NO: 11732 - DNA, 25 bp, Homo sapiens
ggcaggtgtgatctccaggcttgag

SEQ ID NO: 11733 - DNA, 25 bp, Homo sapiens
gcaggtgtgatctccaggcttgaga

SEQ ID NO: 11734 - DNA, 25 bp, Homo sapiens
caggtgtgatctccaggcttgagaa

SEQ ID NO: 11735 - DNA, 25 bp, Homo sapiens
aggtgtgatctccaggcttgagaag

SEQ ID NO: 11736 - DNA, 25 bp, Homo sapiens
ggtgtgatctccaggcttgagaagc

SEQ ID NO: 11737 - DNA, 25 bp, Homo sapiens
gtgtgatctccaggcttgagaagca

SEQ ID NO: 11738 - DNA, 25 bp, Homo sapiens
tgtgatctccaggcttgagaagcag

SEQ ID NO: 11739 - DNA, 25 bp, Homo sapiens
gtgatctccaggcttgagaagcagc

SEQ ID NO: 11740 - DNA, 25 bp, Homo sapiens
tgatctccaggcttgagaagcagcg

SEQ ID NO: 11741 - DNA, 25 bp, Homo sapiens
gatctccaggcttgagaagcagcga

SEQ ID NO: 11742 - DNA, 25 bp, Homo sapiens
atctccaggcttgagaagcagcgag

SEQ ID NO: 11743 - DNA, 25 bp, Homo sapiens
tctccaggcttgagaagcagcgaga

SEQ ID NO: 11744 - DNA, 25 bp, Homo sapiens
ctccaggcttgagaagcagcgagag

SEQ ID NO: 11745 - DNA, 25 bp, Homo sapiens
tccaggcttgagaagcagcgagaga

SEQ ID NO: 11746 - DNA, 25 bp, Homo sapiens
ccaggcttgagaagcagcgagagaa

SEQ ID NO: 11747 - DNA, 25 bp, Homo sapiens
caggcttgagaagcagcgagagaag

SEQ ID NO: 11748 - DNA, 25 bp, Homo sapiens
aggcttgagaagcagcgagagaagc

SEQ ID NO: 11749 - DNA, 25 bp, Homo sapiens
ggcttgagaagcagcgagagaagct

SEQ ID NO: 11750 - DNA, 25 bp, Homo sapiens
gcttgagaagcagcgagagaagctg

SEQ ID NO: 11751 - DNA, 25 bp, Homo sapiens
cttgagaagcagcgagagaagctgg

SEQ ID NO: 11752 - DNA, 25 bp, Homo sapiens
ttgagaagcagcgagagaagctggt

SEQ ID NO: 11753 - DNA, 25 bp, Homo sapiens
tgagaagcagcgagagaagctggta

SEQ ID NO: 11754 - DNA, 25 bp, Homo sapiens
gagaagcagcgagagaagctggtat

SEQ ID NO: 11755 - DNA, 25 bp, Homo sapiens
agaagcagcgagagaagctggtatc

SEQ ID NO: 11756 - DNA, 25 bp, Homo sapiens
gaagcagcgagagaagctggtatct

SEQ ID NO: 11757 - DNA, 25 bp, Homo sapiens
aagcagcgagagaagctggtatctc

SEQ ID NO: 11758 - DNA, 25 bp, Homo sapiens
agcagcgagagaagctggtatctca

SEQ ID NO: 11759 - DNA, 25 bp, Homo sapiens
gcagcgagagaagctggtatctcag

SEQ ID NO: 11760 - DNA, 25 bp, Homo sapiens
cagcgagagaagctggtatctcaga

SEQ ID NO: 11761 - DNA, 25 bp, Homo sapiens
agcgagagaagctggtatctcagag

SEQ ID NO: 11762 - DNA, 25 bp, Homo sapiens
gcgagagaagctggtatctcagagc

SEQ ID NO: 11763 - DNA, 25 bp, Homo sapiens
cgagagaagctggtatctcagagca

SEQ ID NO: 11764 - DNA, 25 bp, Homo sapiens
gagagaagctggtatctcagagcat

SEQ ID NO: 11765 - DNA, 25 bp, Homo sapiens
agagaagctggtatctcagagcatc

SEQ ID NO: 11766 - DNA, 25 bp, Homo sapiens
gagaagctggtatctcagagcatcg

SEQ ID NO: 11767 - DNA, 25 bp, Homo sapiens
agaagctggtatctcagagcatcgt

SEQ ID NO: 11768 - DNA, 25 bp, Homo sapiens
gaagctggtatctcagagcatcgtt

SEQ ID NO: 11769 - DNA, 25 bp, Homo sapiens
aagctggtatctcagagcatcgttc

SEQ ID NO: 11770 - DNA, 25 bp, Homo sapiens
agctggtatctcagagcatcgttct

SEQ ID NO: 11771 - DNA, 25 bp, Homo sapiens
gctggtatctcagagcatcgttctc

SEQ ID NO: 11772 - DNA, 25 bp, Homo sapiens
ctggtatctcagagcatcgttctct

SEQ ID NO: 11773 - DNA, 25 bp, Homo sapiens
tggtatctcagagcatcgttctctt

SEQ ID NO: 11774 - DNA, 25 bp, Homo sapiens
ggtatctcagagcatcgttctcttc

SEQ ID NO: 11775 - DNA, 25 bp, Homo sapiens
gtatctcagagcatcgttctcttcc

SEQ ID NO: 11776 - DNA, 25 bp, Homo sapiens
tatctcagagcatcgttctcttcca

SEQ ID NO: 11777 - DNA, 25 bp, Homo sapiens
atctcagagcatcgttctcttccag

SEQ ID NO: 11778 - DNA, 25 bp, Homo sapiens
tctcagagcatcgttctcttccagg

SEQ ID NO: 11779 - DNA, 25 bp, Homo sapiens
ctcagagcatcgttctcttccaggc

SEQ ID NO: 11780 - DNA, 25 bp, Homo sapiens
tcagagcatcgttctcttccaggcg

SEQ ID NO: 11781 - DNA, 25 bp, Homo sapiens
cagagcatcgttctcttccaggcgg

SEQ ID NO: 11782 - DNA, 25 bp, Homo sapiens
agagcatcgttctcttccaggcggc

SEQ ID NO: 11783 - DNA, 25 bp, Homo sapiens
gagcatcgttctcttccaggcggct

SEQ ID NO: 11784 - DNA, 25 bp, Homo sapiens
agcatcgttctcttccaggcggctt

SEQ ID NO: 11785 - DNA, 25 bp, Homo sapiens
gcatcgttctcttccaggcggcttg

SEQ ID NO: 11786 - DNA, 25 bp, Homo sapiens
catcgttctcttccaggcggcttgc

SEQ ID NO: 11787 - DNA, 25 bp, Homo sapiens
atcgttctcttccaggcggcttgca

SEQ ID NO: 11788 - DNA, 25 bp, Homo sapiens
tcgttctcttccaggcggcttgcaa

SEQ ID NO: 11789 - DNA, 25 bp, Homo sapiens
cgttctcttccaggcggcttgcaag

SEQ ID NO: 11790 - DNA, 25 bp, Homo sapiens
gttctcttccaggcggcttgcaagg

SEQ ID NO: 11791 - DNA, 25 bp, Homo sapiens
ttctcttccaggcggcttgcaaggg

SEQ ID NO: 11792 - DNA, 25 bp, Homo sapiens
tctcttccaggcggcttgcaagggc

SEQ ID NO: 11793 - DNA, 25 bp, Homo sapiens
ctcttccaggcggcttgcaagggct

SEQ ID NO: 11794 - DNA, 25 bp, Homo sapiens
tcttccaggcggcttgcaagggctt

SEQ ID NO: 11795 - DNA, 25 bp, Homo sapiens
cttccaggcggcttgcaagggcttt

SEQ ID NO: 11796 - DNA, 25 bp, Homo sapiens
ttccaggcggcttgcaagggctttc

SEQ ID NO: 11797 - DNA, 25 bp, Homo sapiens
tccaggcggcttgcaagggctttct

SEQ ID NO: 11798 - DNA, 25 bp, Homo sapiens
ccaggcggcttgcaagggctttctg

SEQ ID NO: 11799 - DNA, 25 bp, Homo sapiens
caggcggcttgcaagggctttctgt

SEQ ID NO: 11800 - DNA, 25 bp, Homo sapiens
aggcggcttgcaagggctttctgtc

SEQ ID NO: 11801 - DNA, 25 bp, Homo sapiens
ggcggcttgcaagggctttctgtct

SEQ ID NO: 11802 - DNA, 25 bp, Homo sapiens
gcggcttgcaagggctttctgtctc

SEQ ID NO: 11803 - DNA, 25 bp, Homo sapiens
cggcttgcaagggctttctgtctcg

SEQ ID NO: 11804 - DNA, 25 bp, Homo sapiens
ggcttgcaagggctttctgtctcgc

SEQ ID NO: 11805 - DNA, 25 bp, Homo sapiens
gcttgcaagggctttctgtctcgcc

SEQ ID NO: 11806 - DNA, 25 bp, Homo sapiens
cttgcaagggctttctgtctcgcca

SEQ ID NO: 11807 - DNA, 25 bp, Homo sapiens
ttgcaagggctttctgtctcgccag

SEQ ID NO: 11808 - DNA, 25 bp, Homo sapiens
tgcaagggctttctgtctcgccagg

SEQ ID NO: 11809 - DNA, 25 bp, Homo sapiens
gcaagggctttctgtctcgccagga

SEQ ID NO: 11810 - DNA, 25 bp, Homo sapiens
caagggctttctgtctcgccaggaa

SEQ ID NO: 11811 - DNA, 25 bp, Homo sapiens
aagggctttctgtctcgccaggaat

SEQ ID NO: 11812 - DNA, 25 bp, Homo sapiens
agggctttctgtctcgccaggaatt

SEQ ID NO: 11813 - DNA, 25 bp, Homo sapiens
gggctttctgtctcgccaggaattc

SEQ ID NO: 11814 - DNA, 25 bp, Homo sapiens
ggctttctgtctcgccaggaattca

SEQ ID NO: 11815 - DNA, 25 bp, Homo sapiens
gctttctgtctcgccaggaattcaa

SEQ ID NO: 11816 - DNA, 25 bp, Homo sapiens
ctttctgtctcgccaggaattcaag

SEQ ID NO: 11817 - DNA, 25 bp, Homo sapiens
tttctgtctcgccaggaattcaaga

SEQ ID NO: 11818 - DNA, 25 bp, Homo sapiens
ttctgtctcgccaggaattcaagaa

SEQ ID NO: 11819 - DNA, 25 bp, Homo sapiens
tctgtctcgccaggaattcaagaag

SEQ ID NO: 11820 - DNA, 25 bp, Homo sapiens
ctgtctcgccaggaattcaagaagc

SEQ ID NO: 11821 - DNA, 25 bp, Homo sapiens
tgtctcgccaggaattcaagaagct

SEQ ID NO: 11822 - DNA, 25 bp, Homo sapiens
gtctcgccaggaattcaagaagctg

SEQ ID NO: 11823 - DNA, 25 bp, Homo sapiens
tctcgccaggaattcaagaagctga

SEQ ID NO: 11824 - DNA, 25 bp, Homo sapiens
ctcgccaggaattcaagaagctgaa

SEQ ID NO: 11825 - DNA, 25 bp, Homo sapiens
tcgccaggaattcaagaagctgaag

SEQ ID NO: 11826 - DNA, 25 bp, Homo sapiens
cgccaggaattcaagaagctgaaga

SEQ ID NO: 11827 - DNA, 25 bp, Homo sapiens
gccaggaattcaagaagctgaagat

SEQ ID NO: 11828 - DNA, 25 bp, Homo sapiens
ccaggaattcaagaagctgaagatt

SEQ ID NO: 11829 - DNA, 25 bp, Homo sapiens
caggaattcaagaagctgaagattc

SEQ ID NO: 11830 - DNA, 25 bp, Homo sapiens
aggaattcaagaagctgaagattcg

SEQ ID NO: 11831 - DNA, 25 bp, Homo sapiens
ggaattcaagaagctgaagattcgc

SEQ ID NO: 11832 - DNA, 25 bp, Homo sapiens
gaattcaagaagctgaagattcgcc

SEQ ID NO: 11833 - DNA, 25 bp, Homo sapiens
aattcaagaagctgaagattcgccg

SEQ ID NO: 11834 - DNA, 25 bp, Homo sapiens
attcaagaagctgaagattcgccga

SEQ ID NO: 11835 - DNA, 25 bp, Homo sapiens
ttcaagaagctgaagattcgccgac

SEQ ID NO: 11836 - DNA, 25 bp, Homo sapiens
tcaagaagctgaagattcgccgact

SEQ ID NO: 11837 - DNA, 25 bp, Homo sapiens
caagaagctgaagattcgccgactg

SEQ ID NO: 11838 - DNA, 25 bp, Homo sapiens
aagaagctgaagattcgccgactgg

SEQ ID NO: 11839 - DNA, 25 bp, Homo sapiens
agaagctgaagattcgccgactggc

SEQ ID NO: 11840 - DNA, 25 bp, Homo sapiens
gaagctgaagattcgccgactggct

SEQ ID NO: 11841 - DNA, 25 bp, Homo sapiens
aagctgaagattcgccgactggctg

SEQ ID NO: 11842 - DNA, 25 bp, Homo sapiens
agctgaagattcgccgactggctgc

SEQ ID NO: 11843 - DNA, 25 bp, Homo sapiens
gctgaagattcgccgactggctgca

SEQ ID NO: 11844 - DNA, 25 bp, Homo sapiens
ctgaagattcgccgactggctgcac

SEQ ID NO: 11845 - DNA, 25 bp, Homo sapiens
tgaagattcgccgactggctgcaca

SEQ ID NO: 11846 - DNA, 25 bp, Homo sapiens
gaagattcgccgactggctgcacag

SEQ ID NO: 11847 - DNA, 25 bp, Homo sapiens
aagattcgccgactggctgcacagt

SEQ ID NO: 11848 - DNA, 25 bp, Homo sapiens
agattcgccgactggctgcacagtg

SEQ ID NO: 11849 - DNA, 25 bp, Homo sapiens
gattcgccgactggctgcacagtgc

SEQ ID NO: 11850 - DNA, 25 bp, Homo sapiens
attcgccgactggctgcacagtgca

SEQ ID NO: 11851 - DNA, 25 bp, Homo sapiens
ttcgccgactggctgcacagtgcat

SEQ ID NO: 11852 - DNA, 25 bp, Homo sapiens
tcgccgactggctgcacagtgcatc

SEQ ID NO: 11853 - DNA, 25 bp, Homo sapiens
cgccgactggctgcacagtgcatcc

SEQ ID NO: 11854 - DNA, 25 bp, Homo sapiens
gccgactggctgcacagtgcatcca

SEQ ID NO: 11855 - DNA, 25 bp, Homo sapiens
ccgactggctgcacagtgcatccag

SEQ ID NO: 11856 - DNA, 25 bp, Homo sapiens
cgactggctgcacagtgcatccaga

SEQ ID NO: 11857 - DNA, 25 bp, Homo sapiens
gactggctgcacagtgcatccagaa

SEQ ID NO: 11858 - DNA, 25 bp, Homo sapiens
actggctgcacagtgcatccagaag

SEQ ID NO: 11859 - DNA, 25 bp, Homo sapiens
ctggctgcacagtgcatccagaaga

SEQ ID NO: 11860 - DNA, 25 bp, Homo sapiens
tggctgcacagtgcatccagaagaa

SEQ ID NO: 11861 - DNA, 25 bp, Homo sapiens
ggctgcacagtgcatccagaagaat

SEQ ID NO: 11862 - DNA, 25 bp, Homo sapiens
gctgcacagtgcatccagaagaatg

SEQ ID NO: 11863 - DNA, 25 bp, Homo sapiens
ctgcacagtgcatccagaagaatgt

SEQ ID NO: 11864 - DNA, 25 bp, Homo sapiens
tgcacagtgcatccagaagaatgtg

SEQ ID NO: 11865 - DNA, 25 bp, Homo sapiens
gcacagtgcatccagaagaatgtgg

SEQ ID NO: 11866 - DNA, 25 bp, Homo sapiens
cacagtgcatccagaagaatgtggc

SEQ ID NO: 11867 - DNA, 25 bp, Homo sapiens
acagtgcatccagaagaatgtggct

SEQ ID NO: 11868 - DNA, 25 bp, Homo sapiens
cagtgcatccagaagaatgtggctg

SEQ ID NO: 11869 - DNA, 25 bp, Homo sapiens
agtgcatccagaagaatgtggctgt

SEQ ID NO: 11870 - DNA, 25 bp, Homo sapiens
gtgcatccagaagaatgtggctgtg

SEQ ID NO: 11871 - DNA, 25 bp, Homo sapiens
tgcatccagaagaatgtggctgtgt

SEQ ID NO: 11872 - DNA, 25 bp, Homo sapiens
gcatccagaagaatgtggctgtgtt

SEQ ID NO: 11873 - DNA, 25 bp, Homo sapiens
catccagaagaatgtggctgtgttc

SEQ ID NO: 11874 - DNA, 25 bp, Homo sapiens
atccagaagaatgtggctgtgttcc

SEQ ID NO: 11875 - DNA, 25 bp, Homo sapiens
tccagaagaatgtggctgtgttcct

SEQ ID NO: 11876 - DNA, 25 bp, Homo sapiens
ccagaagaatgtggctgtgttcctc

SEQ ID NO: 11877 - DNA, 25 bp, Homo sapiens
cagaagaatgtggctgtgttcctcg

SEQ ID NO: 11878 - DNA, 25 bp, Homo sapiens
agaagaatgtggctgtgttcctcgc

SEQ ID NO: 11879 - DNA, 25 bp, Homo sapiens
gaagaatgtggctgtgttcctcgca

SEQ ID NO: 11880 - DNA, 25 bp, Homo sapiens
aagaatgtggctgtgttcctcgcag

SEQ ID NO: 11881 - DNA, 25 bp, Homo sapiens
agaatgtggctgtgttcctcgcagt

SEQ ID NO: 11882 - DNA, 25 bp, Homo sapiens
gaatgtggctgtgttcctcgcagtc

SEQ ID NO: 11883 - DNA, 25 bp, Homo sapiens
aatgtggctgtgttcctcgcagtca

SEQ ID NO: 11884 - DNA, 25 bp, Homo sapiens
atgtggctgtgttcctcgcagtcaa

SEQ ID NO: 11885 - DNA, 25 bp, Homo sapiens
tgtggctgtgttcctcgcagtcaag

SEQ ID NO: 11886 - DNA, 25 bp, Homo sapiens
gtggctgtgttcctcgcagtcaagg

SEQ ID NO: 11887 - DNA, 25 bp, Homo sapiens
tggctgtgttcctcgcagtcaagga

SEQ ID NO: 11888 - DNA, 25 bp, Homo sapiens
ggctgtgttcctcgcagtcaaggac

SEQ ID NO: 11889 - DNA, 25 bp, Homo sapiens
gctgtgttcctcgcagtcaaggact

SEQ ID NO: 11890 - DNA, 25 bp, Homo sapiens
ctgtgttcctcgcagtcaaggactg

SEQ ID NO: 11891 - DNA, 25 bp, Homo sapiens
tgtgttcctcgcagtcaaggactgg

SEQ ID NO: 11892 - DNA, 25 bp, Homo sapiens
gtgttcctcgcagtcaaggactggc

SEQ ID NO: 11893 - DNA, 25 bp, Homo sapiens
tgttcctcgcagtcaaggactggcc

SEQ ID NO: 11894 - DNA, 25 bp, Homo sapiens
gttcctcgcagtcaaggactggcca

SEQ ID NO: 11895 - DNA, 25 bp, Homo sapiens
ttcctcgcagtcaaggactggccat

SEQ ID NO: 11896 - DNA, 25 bp, Homo sapiens
tcctcgcagtcaaggactggccatg

SEQ ID NO: 11897 - DNA, 25 bp, Homo sapiens
cctcgcagtcaaggactggccatgg

SEQ ID NO: 11898 - DNA, 25 bp, Homo sapiens
ctcgcagtcaaggactggccatggt

SEQ ID NO: 11899 - DNA, 25 bp, Homo sapiens
tcgcagtcaaggactggccatggtg

SEQ ID NO: 11900 - DNA, 25 bp, Homo sapiens
cgcagtcaaggactggccatggtgg

SEQ ID NO: 11901 - DNA, 25 bp, Homo sapiens
gcagtcaaggactggccatggtggc

SEQ ID NO: 11902 - DNA, 25 bp, Homo sapiens
cagtcaaggactggccatggtggca

SEQ ID NO: 11903 - DNA, 25 bp, Homo sapiens
agtcaaggactggccatggtggcag

SEQ ID NO: 11904 - DNA, 25 bp, Homo sapiens
gtcaaggactggccatggtggcagc

SEQ ID NO: 11905 - DNA, 25 bp, Homo sapiens
tcaaggactggccatggtggcagct

SEQ ID NO: 11906 - DNA, 25 bp, Homo sapiens
caaggactggccatggtggcagctg

SEQ ID NO: 11907 - DNA, 25 bp, Homo sapiens
aaggactggccatggtggcagctgc

SEQ ID NO: 11908 - DNA, 25 bp, Homo sapiens
aggactggccatggtggcagctgct

SEQ ID NO: 11909 - DNA, 25 bp, Homo sapiens
ggactggccatggtggcagctgctt

SEQ ID NO: 11910 - DNA, 25 bp, Homo sapiens
gactggccatggtggcagctgcttg

SEQ ID NO: 11911 - DNA, 25 bp, Homo sapiens
actggccatggtggcagctgcttgg

SEQ ID NO: 11912 - DNA, 25 bp, Homo sapiens
ctggccatggtggcagctgcttggt

SEQ ID NO: 11913 - DNA, 25 bp, Homo sapiens
tggccatggtggcagctgcttggtt

SEQ ID NO: 11914 - DNA, 25 bp, Homo sapiens
ggccatggtggcagctgcttggttc

SEQ ID NO: 11915 - DNA, 25 bp, Homo sapiens
gccatggtggcagctgcttggttcc

SEQ ID NO: 11916 - DNA, 25 bp, Homo sapiens
ccatggtggcagctgcttggttccc

SEQ ID NO: 11917 - DNA, 25 bp, Homo sapiens
catggtggcagctgcttggttccct

SEQ ID NO: 11918 - DNA, 25 bp, Homo sapiens
atggtggcagctgcttggttccctc

SEQ ID NO: 11919 - DNA, 25 bp, Homo sapiens
tggtggcagctgcttggttccctcc

SEQ ID NO: 11920 - DNA, 25 bp, Homo sapiens
ggtggcagctgcttggttccctcca

SEQ ID NO: 11921 - DNA, 25 bp, Homo sapiens
gtggcagctgcttggttccctccag

SEQ ID NO: 11922 - DNA, 25 bp, Homo sapiens
tggcagctgcttggttccctccagc

SEQ ID NO: 11923 - DNA, 25 bp, Homo sapiens
ggcagctgcttggttccctccagcc

SEQ ID NO: 11924 - DNA, 25 bp, Homo sapiens
gcagctgcttggttccctccagcct

SEQ ID NO: 11925 - DNA, 25 bp, Homo sapiens
cagctgcttggttccctccagcctc

SEQ ID NO: 11926 - DNA, 25 bp, Homo sapiens
agctgcttggttccctccagcctct

SEQ ID NO: 11927 - DNA, 25 bp, Homo sapiens
gctgcttggttccctccagcctcta

SEQ ID NO: 11928 - DNA, 25 bp, Homo sapiens
ctgcttggttccctccagcctctac

SEQ ID NO: 11929 - DNA, 25 bp, Homo sapiens
tgcttggttccctccagcctctact

SEQ ID NO: 11930 - DNA, 25 bp, Homo sapiens
gcttggttccctccagcctctactt

SEQ ID NO: 11931 - DNA, 25 bp, Homo sapiens
cttggttccctccagcctctactta

SEQ ID NO: 11932 - DNA, 25 bp, Homo sapiens
ttggttccctccagcctctacttag

SEQ ID NO: 11933 - DNA, 25 bp, Homo sapiens
tggttccctccagcctctacttagt

SEQ ID NO: 11934 - DNA, 25 bp, Homo sapiens
ggttccctccagcctctacttagtg

SEQ ID NO: 11935 - DNA, 25 bp, Homo sapiens
gttccctccagcctctacttagtgc

SEQ ID NO: 11936 - DNA, 25 bp, Homo sapiens
ttccctccagcctctacttagtgcc

SEQ ID NO: 11937 - DNA, 25 bp, Homo sapiens
tccctccagcctctacttagtgcca

SEQ ID NO: 11938 - DNA, 25 bp, Homo sapiens
ccctccagcctctacttagtgccac

SEQ ID NO: 11939 - DNA, 25 bp, Homo sapiens
cctccagcctctacttagtgccacc

SEQ ID NO: 11940 - DNA, 25 bp, Homo sapiens
ctccagcctctacttagtgccacca

SEQ ID NO: 11941 - DNA, 25 bp, Homo sapiens
tccagcctctacttagtgccaccat

SEQ ID NO: 11942 - DNA, 25 bp, Homo sapiens
ccagcctctacttagtgccaccatt

SEQ ID NO: 11943 - DNA, 25 bp, Homo sapiens
cagcctctacttagtgccaccattg

SEQ ID NO: 11944 - DNA, 25 bp, Homo sapiens
agcctctacttagtgccaccattgg

SEQ ID NO: 11945 - DNA, 25 bp, Homo sapiens
gcctctacttagtgccaccattgga

SEQ ID NO: 11946 - DNA, 25 bp, Homo sapiens
cctctacttagtgccaccattggaa

SEQ ID NO: 11947 - DNA, 25 bp, Homo sapiens
ctctacttagtgccaccattggaac

SEQ ID NO: 11948 - DNA, 25 bp, Homo sapiens
tctacttagtgccaccattggaact

SEQ ID NO: 11949 - DNA, 25 bp, Homo sapiens
ctacttagtgccaccattggaactg

SEQ ID NO: 11950 - DNA, 25 bp, Homo sapiens
tacttagtgccaccattggaactga

SEQ ID NO: 11951 - DNA, 25 bp, Homo sapiens
acttagtgccaccattggaactgag

SEQ ID NO: 11952 - DNA, 25 bp, Homo sapiens
cttagtgccaccattggaactgagc

SEQ ID NO: 11953 - DNA, 25 bp, Homo sapiens
ttagtgccaccattggaactgagca

SEQ ID NO: 11954 - DNA, 25 bp, Homo sapiens
tagtgccaccattggaactgagcag

SEQ ID NO: 11955 - DNA, 25 bp, Homo sapiens
agtgccaccattggaactgagcagc

SEQ ID NO: 11956 - DNA, 25 bp, Homo sapiens
gtgccaccattggaactgagcagct

SEQ ID NO: 11957 - DNA, 25 bp, Homo sapiens
tgccaccattggaactgagcagctc

SEQ ID NO: 11958 - DNA, 25 bp, Homo sapiens
gccaccattggaactgagcagctcc

SEQ ID NO: 11959 - DNA, 25 bp, Homo sapiens
ccaccattggaactgagcagctccg

SEQ ID NO: 11960 - DNA, 25 bp, Homo sapiens
caccattggaactgagcagctccga

SEQ ID NO: 11961 - DNA, 25 bp, Homo sapiens
accattggaactgagcagctccgag

SEQ ID NO: 11962 - DNA, 25 bp, Homo sapiens
ccattggaactgagcagctccgagc

SEQ ID NO: 11963 - DNA, 25 bp, Homo sapiens
cattggaactgagcagctccgagcc

SEQ ID NO: 11964 - DNA, 25 bp, Homo sapiens
attggaactgagcagctccgagcca

SEQ ID NO: 11965 - DNA, 25 bp, Homo sapiens
ttggaactgagcagctccgagccaa

SEQ ID NO: 11966 - DNA, 25 bp, Homo sapiens
tggaactgagcagctccgagccaag

SEQ ID NO: 11967 - DNA, 25 bp, Homo sapiens
ggaactgagcagctccgagccaagg

SEQ ID NO: 11968 - DNA, 25 bp, Homo sapiens
gaactgagcagctccgagccaagga

SEQ ID NO: 11969 - DNA, 25 bp, Homo sapiens
aactgagcagctccgagccaaggag

SEQ ID NO: 11970 - DNA, 25 bp, Homo sapiens
actgagcagctccgagccaaggagg

SEQ ID NO: 11971 - DNA, 25 bp, Homo sapiens
ctgagcagctccgagccaaggagga

SEQ ID NO: 11972 - DNA, 25 bp, Homo sapiens
tgagcagctccgagccaaggaggag

SEQ ID NO: 11973 - DNA, 25 bp, Homo sapiens
gagcagctccgagccaaggaggagg

SEQ ID NO: 11974 - DNA, 25 bp, Homo sapiens
agcagctccgagccaaggaggagga

SEQ ID NO: 11975 - DNA, 25 bp, Homo sapiens
gcagctccgagccaaggaggaggag

SEQ ID NO: 11976 - DNA, 25 bp, Homo sapiens
cagctccgagccaaggaggaggagc

SEQ ID NO: 11977 - DNA, 25 bp, Homo sapiens
agctccgagccaaggaggaggagct

SEQ ID NO: 11978 - DNA, 25 bp, Homo sapiens
gctccgagccaaggaggaggagctt

SEQ ID NO: 11979 - DNA, 25 bp, Homo sapiens
ctccgagccaaggaggaggagctta

SEQ ID NO: 11980 - DNA, 25 bp, Homo sapiens
tccgagccaaggaggaggagcttac

SEQ ID NO: 11981 - DNA, 25 bp, Homo sapiens
ccgagccaaggaggaggagcttaca

SEQ ID NO: 11982 - DNA, 25 bp, Homo sapiens
cgagccaaggaggaggagcttacaa

SEQ ID NO: 11983 - DNA, 25 bp, Homo sapiens
gagccaaggaggaggagcttacaac

SEQ ID NO: 11984 - DNA, 25 bp, Homo sapiens
agccaaggaggaggagcttacaacg

SEQ ID NO: 11985 - DNA, 25 bp, Homo sapiens
gccaaggaggaggagcttacaacgc

SEQ ID NO: 11986 - DNA, 25 bp, Homo sapiens
ccaaggaggaggagcttacaacgct

SEQ ID NO: 11987 - DNA, 25 bp, Homo sapiens
caaggaggaggagcttacaacgcta

SEQ ID NO: 11988 - DNA, 25 bp, Homo sapiens
aaggaggaggagcttacaacgctaa

SEQ ID NO: 11989 - DNA, 25 bp, Homo sapiens
aggaggaggagcttacaacgctaag

SEQ ID NO: 11990 - DNA, 25 bp, Homo sapiens
ggaggaggagcttacaacgctaaga

SEQ ID NO: 11991 - DNA, 25 bp, Homo sapiens
gaggaggagcttacaacgctaagac

SEQ ID NO: 11992 - DNA, 25 bp, Homo sapiens
aggaggagcttacaacgctaagacg

SEQ ID NO: 11993 - DNA, 25 bp, Homo sapiens
ggaggagcttacaacgctaagacgg

SEQ ID NO: 11994 - DNA, 25 bp, Homo sapiens
gaggagcttacaacgctaagacgga

SEQ ID NO: 11995 - DNA, 25 bp, Homo sapiens
aggagcttacaacgctaagacggaa

SEQ ID NO: 11996 - DNA, 25 bp, Homo sapiens
ggagcttacaacgctaagacggaag

SEQ ID NO: 11997 - DNA, 25 bp, Homo sapiens
gagcttacaacgctaagacggaagc

SEQ ID NO: 11998 - DNA, 25 bp, Homo sapiens
agcttacaacgctaagacggaagct

SEQ ID NO: 11999 - DNA, 25 bp, Homo sapiens
gcttacaacgctaagacggaagcta

SEQ ID NO: 12000 - DNA, 25 bp, Homo sapiens
cttacaacgctaagacggaagctag

SEQ ID NO: 12001 - DNA, 25 bp, Homo sapiens
ttacaacgctaagacggaagctaga

SEQ ID NO: 12002 - DNA, 25 bp, Homo sapiens
tacaacgctaagacggaagctagaa

SEQ ID NO: 12003 - DNA, 25 bp, Homo sapiens
acaacgctaagacggaagctagaaa

SEQ ID NO: 12004 - DNA, 25 bp, Homo sapiens
caacgctaagacggaagctagaaaa

SEQ ID NO: 12005 - DNA, 25 bp, Homo sapiens
aacgctaagacggaagctagaaaaa

SEQ ID NO: 12006 - DNA, 25 bp, Homo sapiens
acgctaagacggaagctagaaaaat

SEQ ID NO: 12007 - DNA, 25 bp, Homo sapiens
cgctaagacggaagctagaaaaatc

SEQ ID NO: 12008 - DNA, 25 bp, Homo sapiens
gctaagacggaagctagaaaaatca

SEQ ID NO: 12009 - DNA, 25 bp, Homo sapiens
ctaagacggaagctagaaaaatcag

SEQ ID NO: 12010 - DNA, 25 bp, Homo sapiens
taagacggaagctagaaaaatcaga

SEQ ID NO: 12011 - DNA, 25 bp, Homo sapiens
aagacggaagctagaaaaatcagag

SEQ ID NO: 12012 - DNA, 25 bp, Homo sapiens
agacggaagctagaaaaatcagaga

SEQ ID NO: 12013 - DNA, 25 bp, Homo sapiens
gacggaagctagaaaaatcagagaa

SEQ ID NO: 12014 - DNA, 25 bp, Homo sapiens
acggaagctagaaaaatcagagaag

SEQ ID NO: 12015 - DNA, 25 bp, Homo sapiens
cggaagctagaaaaatcagagaagt

SEQ ID NO: 12016 - DNA, 25 bp, Homo sapiens
ggaagctagaaaaatcagagaagtt

SEQ ID NO: 12017 - DNA, 25 bp, Homo sapiens
gaagctagaaaaatcagagaagttg

SEQ ID NO: 12018 - DNA, 25 bp, Homo sapiens
aagctagaaaaatcagagaagttgc

SEQ ID NO: 12019 - DNA, 25 bp, Homo sapiens
agctagaaaaatcagagaagttgcg

SEQ ID NO: 12020 - DNA, 25 bp, Homo sapiens
gctagaaaaatcagagaagttgcgg

SEQ ID NO: 12021 - DNA, 25 bp, Homo sapiens
ctagaaaaatcagagaagttgcgga

SEQ ID NO: 12022 - DNA, 25 bp, Homo sapiens
tagaaaaatcagagaagttgcggaa

SEQ ID NO: 12023 - DNA, 25 bp, Homo sapiens
agaaaaatcagagaagttgcggaat

SEQ ID NO: 12024 - DNA, 25 bp, Homo sapiens
gaaaaatcagagaagttgcggaatg

SEQ ID NO: 12025 - DNA, 25 bp, Homo sapiens
aaaaatcagagaagttgcggaatga

SEQ ID NO: 12026 - DNA, 25 bp, Homo sapiens
aaaatcagagaagttgcggaatgaa

SEQ ID NO: 12027 - DNA, 25 bp, Homo sapiens
aaatcagagaagttgcggaatgaac

SEQ ID NO: 12028 - DNA, 25 bp, Homo sapiens
aatcagagaagttgcggaatgaact

SEQ ID NO: 12029 - DNA, 25 bp, Homo sapiens
atcagagaagttgcggaatgaactc

SEQ ID NO: 12030 - DNA, 25 bp, Homo sapiens
tcagagaagttgcggaatgaactcc

SEQ ID NO: 12031 - DNA, 25 bp, Homo sapiens
cagagaagttgcggaatgaactccg

SEQ ID NO: 12032 - DNA, 25 bp, Homo sapiens
agagaagttgcggaatgaactccgg

SEQ ID NO: 12033 - DNA, 25 bp, Homo sapiens
gagaagttgcggaatgaactccggc

SEQ ID NO: 12034 - DNA, 25 bp, Homo sapiens
agaagttgcggaatgaactccggca

SEQ ID NO: 12035 - DNA, 25 bp, Homo sapiens
gaagttgcggaatgaactccggcag

SEQ ID NO: 12036 - DNA, 25 bp, Homo sapiens
aagttgcggaatgaactccggcaga

SEQ ID NO: 12037 - DNA, 25 bp, Homo sapiens
agttgcggaatgaactccggcagaa

SEQ ID NO: 12038 - DNA, 25 bp, Homo sapiens
gttgcggaatgaactccggcagaac

SEQ ID NO: 12039 - DNA, 25 bp, Homo sapiens
ttgcggaatgaactccggcagaaca

SEQ ID NO: 12040 - DNA, 25 bp, Homo sapiens
tgcggaatgaactccggcagaacac

SEQ ID NO: 12041 - DNA, 25 bp, Homo sapiens
gcggaatgaactccggcagaacaca

SEQ ID NO: 12042 - DNA, 25 bp, Homo sapiens
cggaatgaactccggcagaacacag

SEQ ID NO: 12043 - DNA, 25 bp, Homo sapiens
ggaatgaactccggcagaacacaga

SEQ ID NO: 12044 - DNA, 25 bp, Homo sapiens
gaatgaactccggcagaacacagat

SEQ ID NO: 12045 - DNA, 25 bp, Homo sapiens
aatgaactccggcagaacacagatc

SEQ ID NO: 12046 - DNA, 25 bp, Homo sapiens
atgaactccggcagaacacagatct

SEQ ID NO: 12047 - DNA, 25 bp, Homo sapiens
tgaactccggcagaacacagatctg

SEQ ID NO: 12048 - DNA, 25 bp, Homo sapiens
gaactccggcagaacacagatctgc

SEQ ID NO: 12049 - DNA, 25 bp, Homo sapiens
aactccggcagaacacagatctgct

SEQ ID NO: 12050 - DNA, 25 bp, Homo sapiens
actccggcagaacacagatctgcta

SEQ ID NO: 12051 - DNA, 25 bp, Homo sapiens
ctccggcagaacacagatctgctag

SEQ ID NO: 12052 - DNA, 25 bp, Homo sapiens
tccggcagaacacagatctgctaga

SEQ ID NO: 12053 - DNA, 25 bp, Homo sapiens
ccggcagaacacagatctgctagaa

SEQ ID NO: 12054 - DNA, 25 bp, Homo sapiens
cggcagaacacagatctgctagaaa

SEQ ID NO: 12055 - DNA, 25 bp, Homo sapiens
ggcagaacacagatctgctagaaag

SEQ ID NO: 12056 - DNA, 25 bp, Homo sapiens
gcagaacacagatctgctagaaagc

SEQ ID NO: 12057 - DNA, 25 bp, Homo sapiens
cagaacacagatctgctagaaagca

SEQ ID NO: 12058 - DNA, 25 bp, Homo sapiens
agaacacagatctgctagaaagcaa

SEQ ID NO: 12059 - DNA, 25 bp, Homo sapiens
gaacacagatctgctagaaagcaag

SEQ ID NO: 12060 - DNA, 25 bp, Homo sapiens
aacacagatctgctagaaagcaaga

SEQ ID NO: 12061 - DNA, 25 bp, Homo sapiens
acacagatctgctagaaagcaagat

SEQ ID NO: 12062 - DNA, 25 bp, Homo sapiens
cacagatctgctagaaagcaagatt

SEQ ID NO: 12063 - DNA, 25 bp, Homo sapiens
acagatctgctagaaagcaagattg

SEQ ID NO: 12064 - DNA, 25 bp, Homo sapiens
cagatctgctagaaagcaagattgc

SEQ ID NO: 12065 - DNA, 25 bp, Homo sapiens
agatctgctagaaagcaagattgct

SEQ ID NO: 12066 - DNA, 25 bp, Homo sapiens
gatctgctagaaagcaagattgctg

SEQ ID NO: 12067 - DNA, 25 bp, Homo sapiens
atctgctagaaagcaagattgctga

SEQ ID NO: 12068 - DNA, 25 bp, Homo sapiens
tctgctagaaagcaagattgctgac

SEQ ID NO: 12069 - DNA, 25 bp, Homo sapiens
ctgctagaaagcaagattgctgact

SEQ ID NO: 12070 - DNA, 25 bp, Homo sapiens
tgctagaaagcaagattgctgactt

SEQ ID NO: 12071 - DNA, 25 bp, Homo sapiens
gctagaaagcaagattgctgacttg

SEQ ID NO: 12072 - DNA, 25 bp, Homo sapiens
ctagaaagcaagattgctgacttga

SEQ ID NO: 12073 - DNA, 25 bp, Homo sapiens
tagaaagcaagattgctgacttgac

SEQ ID NO: 12074 - DNA, 25 bp, Homo sapiens
agaaagcaagattgctgacttgacc

SEQ ID NO: 12075 - DNA, 25 bp, Homo sapiens
gaaagcaagattgctgacttgacct

SEQ ID NO: 12076 - DNA, 25 bp, Homo sapiens
aaagcaagattgctgacttgacctc

SEQ ID NO: 12077 - DNA, 25 bp, Homo sapiens
aagcaagattgctgacttgacctct

SEQ ID NO: 12078 - DNA, 25 bp, Homo sapiens
agcaagattgctgacttgacctctg

SEQ ID NO: 12079 - DNA, 25 bp, Homo sapiens
gcaagattgctgacttgacctctga

SEQ ID NO: 12080 - DNA, 25 bp, Homo sapiens
caagattgctgacttgacctctgac

SEQ ID NO: 12081 - DNA, 25 bp, Homo sapiens
aagattgctgacttgacctctgacc

SEQ ID NO: 12082 - DNA, 25 bp, Homo sapiens
agattgctgacttgacctctgacct

SEQ ID NO: 12083 - DNA, 25 bp, Homo sapiens
gattgctgacttgacctctgacctt

SEQ ID NO: 12084 - DNA, 25 bp, Homo sapiens
attgctgacttgacctctgaccttg

SEQ ID NO: 12085 - DNA, 25 bp, Homo sapiens
ttgctgacttgacctctgaccttgc

SEQ ID NO: 12086 - DNA, 25 bp, Homo sapiens
tgctgacttgacctctgaccttgcc

SEQ ID NO: 12087 - DNA, 25 bp, Homo sapiens
gctgacttgacctctgaccttgccg

SEQ ID NO: 12088 - DNA, 25 bp, Homo sapiens
ctgacttgacctctgaccttgccga

SEQ ID NO: 12089 - DNA, 25 bp, Homo sapiens
tgacttgacctctgaccttgccgat

SEQ ID NO: 12090 - DNA, 25 bp, Homo sapiens
gacttgacctctgaccttgccgatg

SEQ ID NO: 12091 - DNA, 25 bp, Homo sapiens
acttgacctctgaccttgccgatga

SEQ ID NO: 12092 - DNA, 25 bp, Homo sapiens
cttgacctctgaccttgccgatgag

SEQ ID NO: 12093 - DNA, 25 bp, Homo sapiens
ttgacctctgaccttgccgatgagc

SEQ ID NO: 12094 - DNA, 25 bp, Homo sapiens
tgacctctgaccttgccgatgagcg

SEQ ID NO: 12095 - DNA, 25 bp, Homo sapiens
gacctctgaccttgccgatgagcgc

SEQ ID NO: 12096 - DNA, 25 bp, Homo sapiens
acctctgaccttgccgatgagcgct

SEQ ID NO: 12097 - DNA, 25 bp, Homo sapiens
cctctgaccttgccgatgagcgctt

SEQ ID NO: 12098 - DNA, 25 bp, Homo sapiens
ctctgaccttgccgatgagcgcttc

SEQ ID NO: 12099 - DNA, 25 bp, Homo sapiens
tctgaccttgccgatgagcgcttca

SEQ ID NO: 12100 - DNA, 25 bp, Homo sapiens
ctgaccttgccgatgagcgcttcaa

SEQ ID NO: 12101 - DNA, 25 bp, Homo sapiens
tgaccttgccgatgagcgcttcaaa

SEQ ID NO: 12102 - DNA, 25 bp, Homo sapiens
gaccttgccgatgagcgcttcaaag

SEQ ID NO: 12103 - DNA, 25 bp, Homo sapiens
accttgccgatgagcgcttcaaagg

SEQ ID NO: 12104 - DNA, 25 bp, Homo sapiens
ccttgccgatgagcgcttcaaaggt

SEQ ID NO: 12105 - DNA, 25 bp, Homo sapiens
cttgccgatgagcgcttcaaaggtg

SEQ ID NO: 12106 - DNA, 25 bp, Homo sapiens
ttgccgatgagcgcttcaaaggtga

SEQ ID NO: 12107 - DNA, 25 bp, Homo sapiens
tgccgatgagcgcttcaaaggtgat

SEQ ID NO: 12108 - DNA, 25 bp, Homo sapiens
gccgatgagcgcttcaaaggtgatg

SEQ ID NO: 12109 - DNA, 25 bp, Homo sapiens
ccgatgagcgcttcaaaggtgatgt

SEQ ID NO: 12110 - DNA, 25 bp, Homo sapiens
cgatgagcgcttcaaaggtgatgtg

SEQ ID NO: 12111 - DNA, 25 bp, Homo sapiens
gatgagcgcttcaaaggtgatgtgg

SEQ ID NO: 12112 - DNA, 25 bp, Homo sapiens
atgagcgcttcaaaggtgatgtggc

SEQ ID NO: 12113 - DNA, 25 bp, Homo sapiens
tgagcgcttcaaaggtgatgtggcc

SEQ ID NO: 12114 - DNA, 25 bp, Homo sapiens
gagcgcttcaaaggtgatgtggcct

SEQ ID NO: 12115 - DNA, 25 bp, Homo sapiens
agcgcttcaaaggtgatgtggcctg

SEQ ID NO: 12116 - DNA, 25 bp, Homo sapiens
gcgcttcaaaggtgatgtggcctgc

SEQ ID NO: 12117 - DNA, 25 bp, Homo sapiens
cgcttcaaaggtgatgtggcctgcc

SEQ ID NO: 12118 - DNA, 25 bp, Homo sapiens
gcttcaaaggtgatgtggcctgcca

SEQ ID NO: 12119 - DNA, 25 bp, Homo sapiens
cttcaaaggtgatgtggcctgccag

SEQ ID NO: 12120 - DNA, 25 bp, Homo sapiens
ttcaaaggtgatgtggcctgccagg

SEQ ID NO: 12121 - DNA, 25 bp, Homo sapiens
tcaaaggtgatgtggcctgccaggt

SEQ ID NO: 12122 - DNA, 25 bp, Homo sapiens
caaaggtgatgtggcctgccaggtg

SEQ ID NO: 12123 - DNA, 25 bp, Homo sapiens
aaaggtgatgtggcctgccaggtgc

SEQ ID NO: 12124 - DNA, 25 bp, Homo sapiens
aaggtgatgtggcctgccaggtgct

SEQ ID NO: 12125 - DNA, 25 bp, Homo sapiens
aggtgatgtggcctgccaggtgctg

SEQ ID NO: 12126 - DNA, 25 bp, Homo sapiens
ggtgatgtggcctgccaggtgctgg

SEQ ID NO: 12127 - DNA, 25 bp, Homo sapiens
gtgatgtggcctgccaggtgctgga

SEQ ID NO: 12128 - DNA, 25 bp, Homo sapiens
tgatgtggcctgccaggtgctggag

SEQ ID NO: 12129 - DNA, 25 bp, Homo sapiens
gatgtggcctgccaggtgctggaga

SEQ ID NO: 12130 - DNA, 25 bp, Homo sapiens
atgtggcctgccaggtgctggagag

SEQ ID NO: 12131 - DNA, 25 bp, Homo sapiens
tgtggcctgccaggtgctggagagt

SEQ ID NO: 12132 - DNA, 25 bp, Homo sapiens
gtggcctgccaggtgctggagagtg

SEQ ID NO: 12133 - DNA, 25 bp, Homo sapiens
tggcctgccaggtgctggagagtga

SEQ ID NO: 12134 - DNA, 25 bp, Homo sapiens
ggcctgccaggtgctggagagtgag

SEQ ID NO: 12135 - DNA, 25 bp, Homo sapiens
gcctgccaggtgctggagagtgagc

SEQ ID NO: 12136 - DNA, 25 bp, Homo sapiens
cctgccaggtgctggagagtgagcg

SEQ ID NO: 12137 - DNA, 25 bp, Homo sapiens
ctgccaggtgctggagagtgagcgg

SEQ ID NO: 12138 - DNA, 25 bp, Homo sapiens
tgccaggtgctggagagtgagcggg

SEQ ID NO: 12139 - DNA, 25 bp, Homo sapiens
gccaggtgctggagagtgagcgggc

SEQ ID NO: 12140 - DNA, 25 bp, Homo sapiens
ccaggtgctggagagtgagcgggca

SEQ ID NO: 12141 - DNA, 25 bp, Homo sapiens
caggtgctggagagtgagcgggcag

SEQ ID NO: 12142 - DNA, 25 bp, Homo sapiens
aggtgctggagagtgagcgggcaga

SEQ ID NO: 12143 - DNA, 25 bp, Homo sapiens
ggtgctggagagtgagcgggcagag

SEQ ID NO: 12144 - DNA, 25 bp, Homo sapiens
gtgctggagagtgagcgggcagagc

SEQ ID NO: 12145 - DNA, 25 bp, Homo sapiens
tgctggagagtgagcgggcagagcg

SEQ ID NO: 12146 - DNA, 25 bp, Homo sapiens
gctggagagtgagcgggcagagcgg

SEQ ID NO: 12147 - DNA, 25 bp, Homo sapiens
ctggagagtgagcgggcagagcggc

SEQ ID NO: 12148 - DNA, 25 bp, Homo sapiens
tggagagtgagcgggcagagcggct

SEQ ID NO: 12149 - DNA, 25 bp, Homo sapiens
ggagagtgagcgggcagagcggcta

SEQ ID NO: 12150 - DNA, 25 bp, Homo sapiens
gagagtgagcgggcagagcggctac

SEQ ID NO: 12151 - DNA, 25 bp, Homo sapiens
agagtgagcgggcagagcggctaca

SEQ ID NO: 12152 - DNA, 25 bp, Homo sapiens
gagtgagcgggcagagcggctacag

SEQ ID NO: 12153 - DNA, 25 bp, Homo sapiens
agtgagcgggcagagcggctacagg

SEQ ID NO: 12154 - DNA, 25 bp, Homo sapiens
gtgagcgggcagagcggctacaggc

SEQ ID NO: 12155 - DNA, 25 bp, Homo sapiens
tgagcgggcagagcggctacaggcc

SEQ ID NO: 12156 - DNA, 25 bp, Homo sapiens
gagcgggcagagcggctacaggcct

SEQ ID NO: 12157 - DNA, 25 bp, Homo sapiens
agcgggcagagcggctacaggcctt

SEQ ID NO: 12158 - DNA, 25 bp, Homo sapiens
gcgggcagagcggctacaggccttc

SEQ ID NO: 12159 - DNA, 25 bp, Homo sapiens
cgggcagagcggctacaggccttcc

SEQ ID NO: 12160 - DNA, 25 bp, Homo sapiens
gggcagagcggctacaggccttccg

SEQ ID NO: 12161 - DNA, 25 bp, Homo sapiens
ggcagagcggctacaggccttccgg

SEQ ID NO: 12162 - DNA, 25 bp, Homo sapiens
gcagagcggctacaggccttccggg

SEQ ID NO: 12163 - DNA, 25 bp, Homo sapiens
cagagcggctacaggccttccggga

SEQ ID NO: 12164 - DNA, 25 bp, Homo sapiens
agagcggctacaggccttccgggag

SEQ ID NO: 12165 - DNA, 25 bp, Homo sapiens
gagcggctacaggccttccgggagg

SEQ ID NO: 12166 - DNA, 25 bp, Homo sapiens
agcggctacaggccttccgggaggt

SEQ ID NO: 12167 - DNA, 25 bp, Homo sapiens
gcggctacaggccttccgggaggtc

SEQ ID NO: 12168 - DNA, 25 bp, Homo sapiens
cggctacaggccttccgggaggtcc

SEQ ID NO: 12169 - DNA, 25 bp, Homo sapiens
ggctacaggccttccgggaggtcca

SEQ ID NO: 12170 - DNA, 25 bp, Homo sapiens
gctacaggccttccgggaggtccag

SEQ ID NO: 12171 - DNA, 25 bp, Homo sapiens
ctacaggccttccgggaggtccagg

SEQ ID NO: 12172 - DNA, 25 bp, Homo sapiens
tacaggccttccgggaggtccagga

SEQ ID NO: 12173 - DNA, 25 bp, Homo sapiens
acaggccttccgggaggtccaggag

SEQ ID NO: 12174 - DNA, 25 bp, Homo sapiens
caggccttccgggaggtccaggagc

SEQ ID NO: 12175 - DNA, 25 bp, Homo sapiens
aggccttccgggaggtccaggagct

SEQ ID NO: 12176 - DNA, 25 bp, Homo sapiens
ggccttccgggaggtccaggagctc

SEQ ID NO: 12177 - DNA, 25 bp, Homo sapiens
gccttccgggaggtccaggagctca

SEQ ID NO: 12178 - DNA, 25 bp, Homo sapiens
ccttccgggaggtccaggagctcaa

SEQ ID NO: 12179 - DNA, 25 bp, Homo sapiens
cttccgggaggtccaggagctcaag

SEQ ID NO: 12180 - DNA, 25 bp, Homo sapiens
ttccgggaggtccaggagctcaaga

SEQ ID NO: 12181 - DNA, 25 bp, Homo sapiens
tccgggaggtccaggagctcaagag

SEQ ID NO: 12182 - DNA, 25 bp, Homo sapiens
ccgggaggtccaggagctcaagagc

SEQ ID NO: 12183 - DNA, 25 bp, Homo sapiens
cgggaggtccaggagctcaagagca

SEQ ID NO: 12184 - DNA, 25 bp, Homo sapiens
gggaggtccaggagctcaagagcaa

SEQ ID NO: 12185 - DNA, 25 bp, Homo sapiens
ggaggtccaggagctcaagagcaag

SEQ ID NO: 12186 - DNA, 25 bp, Homo sapiens
gaggtccaggagctcaagagcaagc

SEQ ID NO: 12187 - DNA, 25 bp, Homo sapiens
aggtccaggagctcaagagcaagca

SEQ ID NO: 12188 - DNA, 25 bp, Homo sapiens
ggtccaggagctcaagagcaagcat

SEQ ID NO: 12189 - DNA, 25 bp, Homo sapiens
gtccaggagctcaagagcaagcatg

SEQ ID NO: 12190 - DNA, 25 bp, Homo sapiens
tccaggagctcaagagcaagcatga

SEQ ID NO: 12191 - DNA, 25 bp, Homo sapiens
ccaggagctcaagagcaagcatgaa

SEQ ID NO: 12192 - DNA, 25 bp, Homo sapiens
caggagctcaagagcaagcatgaac

SEQ ID NO: 12193 - DNA, 25 bp, Homo sapiens
aggagctcaagagcaagcatgaaca

SEQ ID NO: 12194 - DNA, 25 bp, Homo sapiens
ggagctcaagagcaagcatgaacaa

SEQ ID NO: 12195 - DNA, 25 bp, Homo sapiens
gagctcaagagcaagcatgaacaag

SEQ ID NO: 12196 - DNA, 25 bp, Homo sapiens
agctcaagagcaagcatgaacaagt

SEQ ID NO: 12197 - DNA, 25 bp, Homo sapiens
gctcaagagcaagcatgaacaagtc

SEQ ID NO: 12198 - DNA, 25 bp, Homo sapiens
ctcaagagcaagcatgaacaagtcc

SEQ ID NO: 12199 - DNA, 25 bp, Homo sapiens
tcaagagcaagcatgaacaagtcca

SEQ ID NO: 12200 - DNA, 25 bp, Homo sapiens
caagagcaagcatgaacaagtccag

SEQ ID NO: 12201 - DNA, 25 bp, Homo sapiens
aagagcaagcatgaacaagtccaga

SEQ ID NO: 12202 - DNA, 25 bp, Homo sapiens
agagcaagcatgaacaagtccagaa

SEQ ID NO: 12203 - DNA, 25 bp, Homo sapiens
gagcaagcatgaacaagtccagaaa

SEQ ID NO: 12204 - DNA, 25 bp, Homo sapiens
agcaagcatgaacaagtccagaaaa

SEQ ID NO: 12205 - DNA, 25 bp, Homo sapiens
gcaagcatgaacaagtccagaaaaa

SEQ ID NO: 12206 - DNA, 25 bp, Homo sapiens
caagcatgaacaagtccagaaaaaa

SEQ ID NO: 12207 - DNA, 25 bp, Homo sapiens
aagcatgaacaagtccagaaaaaac

SEQ ID NO: 12208 - DNA, 25 bp, Homo sapiens
agcatgaacaagtccagaaaaaact

SEQ ID NO: 12209 - DNA, 25 bp, Homo sapiens
gcatgaacaagtccagaaaaaactg

SEQ ID NO: 12210 - DNA, 25 bp, Homo sapiens
catgaacaagtccagaaaaaactgg

SEQ ID NO: 12211 - DNA, 25 bp, Homo sapiens
atgaacaagtccagaaaaaactggg

SEQ ID NO: 12212 - DNA, 25 bp, Homo sapiens
tgaacaagtccagaaaaaactggga

SEQ ID NO: 12213 - DNA, 25 bp, Homo sapiens
gaacaagtccagaaaaaactgggag

SEQ ID NO: 12214 - DNA, 25 bp, Homo sapiens
aacaagtccagaaaaaactgggaga

SEQ ID NO: 12215 - DNA, 25 bp, Homo sapiens
acaagtccagaaaaaactgggagat

SEQ ID NO: 12216 - DNA, 25 bp, Homo sapiens
caagtccagaaaaaactgggagatg

SEQ ID NO: 12217 - DNA, 25 bp, Homo sapiens
aagtccagaaaaaactgggagatgt

SEQ ID NO: 12218 - DNA, 25 bp, Homo sapiens
agtccagaaaaaactgggagatgtg

SEQ ID NO: 12219 - DNA, 25 bp, Homo sapiens
gtccagaaaaaactgggagatgtga

SEQ ID NO: 12220 - DNA, 25 bp, Homo sapiens
tccagaaaaaactgggagatgtgaa

SEQ ID NO: 12221 - DNA, 25 bp, Homo sapiens
ccagaaaaaactgggagatgtgaat

SEQ ID NO: 12222 - DNA, 25 bp, Homo sapiens
cagaaaaaactgggagatgtgaata

SEQ ID NO: 12223 - DNA, 25 bp, Homo sapiens
agaaaaaactgggagatgtgaataa

SEQ ID NO: 12224 - DNA, 25 bp, Homo sapiens
gaaaaaactgggagatgtgaataaa

SEQ ID NO: 12225 - DNA, 25 bp, Homo sapiens
aaaaaactgggagatgtgaataaac

SEQ ID NO: 12226 - DNA, 25 bp, Homo sapiens
aaaaactgggagatgtgaataaaca

SEQ ID NO: 12227 - DNA, 25 bp, Homo sapiens
aaaactgggagatgtgaataaacag

SEQ ID NO: 12228 - DNA, 25 bp, Homo sapiens
aaactgggagatgtgaataaacagt

SEQ ID NO: 12229 - DNA, 25 bp, Homo sapiens
aactgggagatgtgaataaacagtt

SEQ ID NO: 12230 - DNA, 25 bp, Homo sapiens
actgggagatgtgaataaacagttg

SEQ ID NO: 12231 - DNA, 25 bp, Homo sapiens
ctgggagatgtgaataaacagttgg

SEQ ID NO: 12232 - DNA, 25 bp, Homo sapiens
tgggagatgtgaataaacagttgga

SEQ ID NO: 12233 - DNA, 25 bp, Homo sapiens
gggagatgtgaataaacagttggaa

SEQ ID NO: 12234 - DNA, 25 bp, Homo sapiens
ggagatgtgaataaacagttggaag

SEQ ID NO: 12235 - DNA, 25 bp, Homo sapiens
gagatgtgaataaacagttggaaga

SEQ ID NO: 12236 - DNA, 25 bp, Homo sapiens
agatgtgaataaacagttggaagaa

SEQ ID NO: 12237 - DNA, 25 bp, Homo sapiens
gatgtgaataaacagttggaagaag

SEQ ID NO: 12238 - DNA, 25 bp, Homo sapiens
atgtgaataaacagttggaagaagc

SEQ ID NO: 12239 - DNA, 25 bp, Homo sapiens
tgtgaataaacagttggaagaagcc

SEQ ID NO: 12240 - DNA, 25 bp, Homo sapiens
gtgaataaacagttggaagaagccc

SEQ ID NO: 12241 - DNA, 25 bp, Homo sapiens
tgaataaacagttggaagaagccca

SEQ ID NO: 12242 - DNA, 25 bp, Homo sapiens
gaataaacagttggaagaagcccag

SEQ ID NO: 12243 - DNA, 25 bp, Homo sapiens
aataaacagttggaagaagcccagc

SEQ ID NO: 12244 - DNA, 25 bp, Homo sapiens
ataaacagttggaagaagcccagca

SEQ ID NO: 12245 - DNA, 25 bp, Homo sapiens
taaacagttggaagaagcccagcag

SEQ ID NO: 12246 - DNA, 25 bp, Homo sapiens
aaacagttggaagaagcccagcaga

SEQ ID NO: 12247 - DNA, 25 bp, Homo sapiens
aacagttggaagaagcccagcagaa

SEQ ID NO: 12248 - DNA, 25 bp, Homo sapiens
acagttggaagaagcccagcagaaa

SEQ ID NO: 12249 - DNA, 25 bp, Homo sapiens
cagttggaagaagcccagcagaaaa

SEQ ID NO: 12250 - DNA, 25 bp, Homo sapiens
agttggaagaagcccagcagaaaat

SEQ ID NO: 12251 - DNA, 25 bp, Homo sapiens
gttggaagaagcccagcagaaaatt

SEQ ID NO: 12252 - DNA, 25 bp, Homo sapiens
ttggaagaagcccagcagaaaattc

SEQ ID NO: 12253 - DNA, 25 bp, Homo sapiens
tggaagaagcccagcagaaaattca

SEQ ID NO: 12254 - DNA, 25 bp, Homo sapiens
ggaagaagcccagcagaaaattcag

SEQ ID NO: 12255 - DNA, 25 bp, Homo sapiens
gaagaagcccagcagaaaattcagt

SEQ ID NO: 12256 - DNA, 25 bp, Homo sapiens
aagaagcccagcagaaaattcagtt

SEQ ID NO: 12257 - DNA, 25 bp, Homo sapiens
agaagcccagcagaaaattcagttg

SEQ ID NO: 12258 - DNA, 25 bp, Homo sapiens
gaagcccagcagaaaattcagttga

SEQ ID NO: 12259 - DNA, 25 bp, Homo sapiens
aagcccagcagaaaattcagttgaa

SEQ ID NO: 12260 - DNA, 25 bp, Homo sapiens
agcccagcagaaaattcagttgaat

SEQ ID NO: 12261 - DNA, 25 bp, Homo sapiens
gcccagcagaaaattcagttgaatg

SEQ ID NO: 12262 - DNA, 25 bp, Homo sapiens
cccagcagaaaattcagttgaatga

SEQ ID NO: 12263 - DNA, 25 bp, Homo sapiens
ccagcagaaaattcagttgaatgac

SEQ ID NO: 12264 - DNA, 25 bp, Homo sapiens
cagcagaaaattcagttgaatgact

SEQ ID NO: 12265 - DNA, 25 bp, Homo sapiens
agcagaaaattcagttgaatgactt

SEQ ID NO: 12266 - DNA, 25 bp, Homo sapiens
gcagaaaattcagttgaatgacttg

SEQ ID NO: 12267 - DNA, 25 bp, Homo sapiens
cagaaaattcagttgaatgacttgg

SEQ ID NO: 12268 - DNA, 25 bp, Homo sapiens
agaaaattcagttgaatgacttgga

SEQ ID NO: 12269 - DNA, 25 bp, Homo sapiens
gaaaattcagttgaatgacttggaa

SEQ ID NO: 12270 - DNA, 25 bp, Homo sapiens
aaaattcagttgaatgacttggaaa

SEQ ID NO: 12271 - DNA, 25 bp, Homo sapiens
aaattcagttgaatgacttggaaag

SEQ ID NO: 12272 - DNA, 25 bp, Homo sapiens
aattcagttgaatgacttggaaagg

SEQ ID NO: 12273 - DNA, 25 bp, Homo sapiens
attcagttgaatgacttggaaaggg

SEQ ID NO: 12274 - DNA, 25 bp, Homo sapiens
ttcagttgaatgacttggaaaggga

SEQ ID NO: 12275 - DNA, 25 bp, Homo sapiens
tcagttgaatgacttggaaagggat

SEQ ID NO: 12276 - DNA, 25 bp, Homo sapiens
cagttgaatgacttggaaagggatc

SEQ ID NO: 12277 - DNA, 25 bp, Homo sapiens
agttgaatgacttggaaagggatcc

SEQ ID NO: 12278 - DNA, 25 bp, Homo sapiens
gttgaatgacttggaaagggatccc

SEQ ID NO: 12279 - DNA, 25 bp, Homo sapiens
ttgaatgacttggaaagggatccca

SEQ ID NO: 12280 - DNA, 25 bp, Homo sapiens
tgaatgacttggaaagggatcccac

SEQ ID NO: 12281 - DNA, 25 bp, Homo sapiens
gaatgacttggaaagggatcccact

SEQ ID NO: 12282 - DNA, 25 bp, Homo sapiens
aatgacttggaaagggatcccactg

SEQ ID NO: 12283 - DNA, 25 bp, Homo sapiens
atgacttggaaagggatcccactgg

SEQ ID NO: 12284 - DNA, 25 bp, Homo sapiens
tgacttggaaagggatcccactgga

SEQ ID NO: 12285 - DNA, 25 bp, Homo sapiens
gacttggaaagggatcccactggag

SEQ ID NO: 12286 - DNA, 25 bp, Homo sapiens
acttggaaagggatcccactggagg

SEQ ID NO: 12287 - DNA, 25 bp, Homo sapiens
cttggaaagggatcccactggagga

SEQ ID NO: 12288 - DNA, 25 bp, Homo sapiens
ttggaaagggatcccactggaggag

SEQ ID NO: 12289 - DNA, 25 bp, Homo sapiens
tggaaagggatcccactggaggagc

SEQ ID NO: 12290 - DNA, 25 bp, Homo sapiens
ggaaagggatcccactggaggagca

SEQ ID NO: 12291 - DNA, 25 bp, Homo sapiens
gaaagggatcccactggaggagcag

SEQ ID NO: 12292 - DNA, 25 bp, Homo sapiens
aaagggatcccactggaggagcaga

SEQ ID NO: 12293 - DNA, 25 bp, Homo sapiens
aagggatcccactggaggagcagac

SEQ ID NO: 12294 - DNA, 25 bp, Homo sapiens
agggatcccactggaggagcagacg

SEQ ID NO: 12295 - DNA, 25 bp, Homo sapiens
gggatcccactggaggagcagacga

SEQ ID NO: 12296 - DNA, 25 bp, Homo sapiens
ggatcccactggaggagcagacgag

SEQ ID NO: 12297 - DNA, 25 bp, Homo sapiens
gatcccactggaggagcagacgagt

SEQ ID NO: 12298 - DNA, 25 bp, Homo sapiens
atcccactggaggagcagacgagtg

SEQ ID NO: 12299 - DNA, 25 bp, Homo sapiens
tcccactggaggagcagacgagtgg

SEQ ID NO: 12300 - DNA, 25 bp, Homo sapiens
cccactggaggagcagacgagtggc

SEQ ID NO: 12301 - DNA, 25 bp, Homo sapiens
ccactggaggagcagacgagtggca

SEQ ID NO: 12302 - DNA, 25 bp, Homo sapiens
cactggaggagcagacgagtggcag

SEQ ID NO: 12303 - DNA, 25 bp, Homo sapiens
actggaggagcagacgagtggcaga

SEQ ID NO: 12304 - DNA, 25 bp, Homo sapiens
ctggaggagcagacgagtggcagat

SEQ ID NO: 12305 - DNA, 25 bp, Homo sapiens
tggaggagcagacgagtggcagatg

SEQ ID NO: 12306 - DNA, 25 bp, Homo sapiens
ggaggagcagacgagtggcagatgc

SEQ ID NO: 12307 - DNA, 25 bp, Homo sapiens
gaggagcagacgagtggcagatgcg

SEQ ID NO: 12308 - DNA, 25 bp, Homo sapiens
aggagcagacgagtggcagatgcgc

SEQ ID NO: 12309 - DNA, 25 bp, Homo sapiens
ggagcagacgagtggcagatgcgct

SEQ ID NO: 12310 - DNA, 25 bp, Homo sapiens
gagcagacgagtggcagatgcgctt

SEQ ID NO: 12311 - DNA, 25 bp, Homo sapiens
agcagacgagtggcagatgcgcttc

SEQ ID NO: 12312 - DNA, 25 bp, Homo sapiens
gcagacgagtggcagatgcgcttcg

SEQ ID NO: 12313 - DNA, 25 bp, Homo sapiens
cagacgagtggcagatgcgcttcga

SEQ ID NO: 12314 - DNA, 25 bp, Homo sapiens
agacgagtggcagatgcgcttcgac

SEQ ID NO: 12315 - DNA, 25 bp, Homo sapiens
gacgagtggcagatgcgcttcgact

SEQ ID NO: 12316 - DNA, 25 bp, Homo sapiens
acgagtggcagatgcgcttcgactg

SEQ ID NO: 12317 - DNA, 25 bp, Homo sapiens
cgagtggcagatgcgcttcgactgt

SEQ ID NO: 12318 - DNA, 25 bp, Homo sapiens
gagtggcagatgcgcttcgactgtg

SEQ ID NO: 12319 - DNA, 25 bp, Homo sapiens
agtggcagatgcgcttcgactgtgc

SEQ ID NO: 12320 - DNA, 25 bp, Homo sapiens
gtggcagatgcgcttcgactgtgct

SEQ ID NO: 12321 - DNA, 25 bp, Homo sapiens
tggcagatgcgcttcgactgtgctc

SEQ ID NO: 12322 - DNA, 25 bp, Homo sapiens
ggcagatgcgcttcgactgtgctca

SEQ ID NO: 12323 - DNA, 25 bp, Homo sapiens
gcagatgcgcttcgactgtgctcag

SEQ ID NO: 12324 - DNA, 25 bp, Homo sapiens
cagatgcgcttcgactgtgctcaga

SEQ ID NO: 12325 - DNA, 25 bp, Homo sapiens
agatgcgcttcgactgtgctcagat

SEQ ID NO: 12326 - DNA, 25 bp, Homo sapiens
gatgcgcttcgactgtgctcagatg

SEQ ID NO: 12327 - DNA, 25 bp, Homo sapiens
atgcgcttcgactgtgctcagatgg

SEQ ID NO: 12328 - DNA, 25 bp, Homo sapiens
tgcgcttcgactgtgctcagatgga

SEQ ID NO: 12329 - DNA, 25 bp, Homo sapiens
gcgcttcgactgtgctcagatggag

SEQ ID NO: 12330 - DNA, 25 bp, Homo sapiens
cgcttcgactgtgctcagatggaga

SEQ ID NO: 12331 - DNA, 25 bp, Homo sapiens
gcttcgactgtgctcagatggagaa

SEQ ID NO: 12332 - DNA, 25 bp, Homo sapiens
cttcgactgtgctcagatggagaac

SEQ ID NO: 12333 - DNA, 25 bp, Homo sapiens
ttcgactgtgctcagatggagaacg

SEQ ID NO: 12334 - DNA, 25 bp, Homo sapiens
tcgactgtgctcagatggagaacga

SEQ ID NO: 12335 - DNA, 25 bp, Homo sapiens
cgactgtgctcagatggagaacgag

SEQ ID NO: 12336 - DNA, 25 bp, Homo sapiens
gactgtgctcagatggagaacgagt

SEQ ID NO: 12337 - DNA, 25 bp, Homo sapiens
actgtgctcagatggagaacgagtt

SEQ ID NO: 12338 - DNA, 25 bp, Homo sapiens
ctgtgctcagatggagaacgagttc

SEQ ID NO: 12339 - DNA, 25 bp, Homo sapiens
tgtgctcagatggagaacgagttcc

SEQ ID NO: 12340 - DNA, 25 bp, Homo sapiens
gtgctcagatggagaacgagttcct

SEQ ID NO: 12341 - DNA, 25 bp, Homo sapiens
tgctcagatggagaacgagttcctc

SEQ ID NO: 12342 - DNA, 25 bp, Homo sapiens
gctcagatggagaacgagttcctca

SEQ ID NO: 12343 - DNA, 25 bp, Homo sapiens
ctcagatggagaacgagttcctcag

SEQ ID NO: 12344 - DNA, 25 bp, Homo sapiens
tcagatggagaacgagttcctcaga

SEQ ID NO: 12345 - DNA, 25 bp, Homo sapiens
cagatggagaacgagttcctcagaa

SEQ ID NO: 12346 - DNA, 25 bp, Homo sapiens
agatggagaacgagttcctcagaaa

SEQ ID NO: 12347 - DNA, 25 bp, Homo sapiens
gatggagaacgagttcctcagaaag

SEQ ID NO: 12348 - DNA, 25 bp, Homo sapiens
atggagaacgagttcctcagaaagc

SEQ ID NO: 12349 - DNA, 25 bp, Homo sapiens
tggagaacgagttcctcagaaagcg

SEQ ID NO: 12350 - DNA, 25 bp, Homo sapiens
ggagaacgagttcctcagaaagcgt

SEQ ID NO: 12351 - DNA, 25 bp, Homo sapiens
gagaacgagttcctcagaaagcgtc

SEQ ID NO: 12352 - DNA, 25 bp, Homo sapiens
agaacgagttcctcagaaagcgtct

SEQ ID NO: 12353 - DNA, 25 bp, Homo sapiens
gaacgagttcctcagaaagcgtctg

SEQ ID NO: 12354 - DNA, 25 bp, Homo sapiens
aacgagttcctcagaaagcgtctgc

SEQ ID NO: 12355 - DNA, 25 bp, Homo sapiens
acgagttcctcagaaagcgtctgca

SEQ ID NO: 12356 - DNA, 25 bp, Homo sapiens
cgagttcctcagaaagcgtctgcag

SEQ ID NO: 12357 - DNA, 25 bp, Homo sapiens
gagttcctcagaaagcgtctgcagc

SEQ ID NO: 12358 - DNA, 25 bp, Homo sapiens
agttcctcagaaagcgtctgcagca

SEQ ID NO: 12359 - DNA, 25 bp, Homo sapiens
gttcctcagaaagcgtctgcagcaa

SEQ ID NO: 12360 - DNA, 25 bp, Homo sapiens
ttcctcagaaagcgtctgcagcaat

SEQ ID NO: 12361 - DNA, 25 bp, Homo sapiens
tcctcagaaagcgtctgcagcaatg

SEQ ID NO: 12362 - DNA, 25 bp, Homo sapiens
cctcagaaagcgtctgcagcaatgc

SEQ ID NO: 12363 - DNA, 25 bp, Homo sapiens
ctcagaaagcgtctgcagcaatgcg

SEQ ID NO: 12364 - DNA, 25 bp, Homo sapiens
tcagaaagcgtctgcagcaatgcga

SEQ ID NO: 12365 - DNA, 25 bp, Homo sapiens
cagaaagcgtctgcagcaatgcgag

SEQ ID NO: 12366 - DNA, 25 bp, Homo sapiens
agaaagcgtctgcagcaatgcgagg

SEQ ID NO: 12367 - DNA, 25 bp, Homo sapiens
gaaagcgtctgcagcaatgcgagga

SEQ ID NO: 12368 - DNA, 25 bp, Homo sapiens
aaagcgtctgcagcaatgcgaggag

SEQ ID NO: 12369 - DNA, 25 bp, Homo sapiens
aagcgtctgcagcaatgcgaggaga

SEQ ID NO: 12370 - DNA, 25 bp, Homo sapiens
agcgtctgcagcaatgcgaggagag

SEQ ID NO: 12371 - DNA, 25 bp, Homo sapiens
gcgtctgcagcaatgcgaggagagg

SEQ ID NO: 12372 - DNA, 25 bp, Homo sapiens
cgtctgcagcaatgcgaggagaggc

SEQ ID NO: 12373 - DNA, 25 bp, Homo sapiens
gtctgcagcaatgcgaggagaggct

SEQ ID NO: 12374 - DNA, 25 bp, Homo sapiens
tctgcagcaatgcgaggagaggctg

SEQ ID NO: 12375 - DNA, 25 bp, Homo sapiens
ctgcagcaatgcgaggagaggctgg

SEQ ID NO: 12376 - DNA, 25 bp, Homo sapiens
tgcagcaatgcgaggagaggctgga

SEQ ID NO: 12377 - DNA, 25 bp, Homo sapiens
gcagcaatgcgaggagaggctggac

SEQ ID NO: 12378 - DNA, 25 bp, Homo sapiens
cagcaatgcgaggagaggctggact

SEQ ID NO: 12379 - DNA, 25 bp, Homo sapiens
agcaatgcgaggagaggctggactc

SEQ ID NO: 12380 - DNA, 25 bp, Homo sapiens
gcaatgcgaggagaggctggactcg

SEQ ID NO: 12381 - DNA, 25 bp, Homo sapiens
caatgcgaggagaggctggactcgg

SEQ ID NO: 12382 - DNA, 25 bp, Homo sapiens
aatgcgaggagaggctggactcgga

SEQ ID NO: 12383 - DNA, 25 bp, Homo sapiens
atgcgaggagaggctggactcggag

SEQ ID NO: 12384 - DNA, 25 bp, Homo sapiens
tgcgaggagaggctggactcggagc

SEQ ID NO: 12385 - DNA, 25 bp, Homo sapiens
gcgaggagaggctggactcggagct

SEQ ID NO: 12386 - DNA, 25 bp, Homo sapiens
cgaggagaggctggactcggagctg

SEQ ID NO: 12387 - DNA, 25 bp, Homo sapiens
gaggagaggctggactcggagctga

SEQ ID NO: 12388 - DNA, 25 bp, Homo sapiens
aggagaggctggactcggagctgac

SEQ ID NO: 12389 - DNA, 25 bp, Homo sapiens
ggagaggctggactcggagctgaca

SEQ ID NO: 12390 - DNA, 25 bp, Homo sapiens
gagaggctggactcggagctgacag

SEQ ID NO: 12391 - DNA, 25 bp, Homo sapiens
agaggctggactcggagctgacagc

SEQ ID NO: 12392 - DNA, 25 bp, Homo sapiens
gaggctggactcggagctgacagcc

SEQ ID NO: 12393 - DNA, 25 bp, Homo sapiens
aggctggactcggagctgacagcca

SEQ ID NO: 12394 - DNA, 25 bp, Homo sapiens
ggctggactcggagctgacagccag

SEQ ID NO: 12395 - DNA, 25 bp, Homo sapiens
gctggactcggagctgacagccagg

SEQ ID NO: 12396 - DNA, 25 bp, Homo sapiens
ctggactcggagctgacagccagga

SEQ ID NO: 12397 - DNA, 25 bp, Homo sapiens
tggactcggagctgacagccaggaa

SEQ ID NO: 12398 - DNA, 25 bp, Homo sapiens
ggactcggagctgacagccaggaaa

SEQ ID NO: 12399 - DNA, 25 bp, Homo sapiens
gactcggagctgacagccaggaaag

SEQ ID NO: 12400 - DNA, 25 bp, Homo sapiens
actcggagctgacagccaggaaaga

SEQ ID NO: 12401 - DNA, 25 bp, Homo sapiens
ctcggagctgacagccaggaaagag

SEQ ID NO: 12402 - DNA, 25 bp, Homo sapiens
tcggagctgacagccaggaaagagc

SEQ ID NO: 12403 - DNA, 25 bp, Homo sapiens
cggagctgacagccaggaaagagct

SEQ ID NO: 12404 - DNA, 25 bp, Homo sapiens
ggagctgacagccaggaaagagctg

SEQ ID NO: 12405 - DNA, 25 bp, Homo sapiens
gagctgacagccaggaaagagctgg

SEQ ID NO: 12406 - DNA, 25 bp, Homo sapiens
agctgacagccaggaaagagctgga

SEQ ID NO: 12407 - DNA, 25 bp, Homo sapiens
gctgacagccaggaaagagctggag

SEQ ID NO: 12408 - DNA, 25 bp, Homo sapiens
ctgacagccaggaaagagctggagc

SEQ ID NO: 12409 - DNA, 25 bp, Homo sapiens
tgacagccaggaaagagctggagca

SEQ ID NO: 12410 - DNA, 25 bp, Homo sapiens
gacagccaggaaagagctggagcaa

SEQ ID NO: 12411 - DNA, 25 bp, Homo sapiens
acagccaggaaagagctggagcaaa

SEQ ID NO: 12412 - DNA, 25 bp, Homo sapiens
cagccaggaaagagctggagcaaaa

SEQ ID NO: 12413 - DNA, 25 bp, Homo sapiens
agccaggaaagagctggagcaaaag

SEQ ID NO: 12414 - DNA, 25 bp, Homo sapiens
gccaggaaagagctggagcaaaagc

SEQ ID NO: 12415 - DNA, 25 bp, Homo sapiens
ccaggaaagagctggagcaaaagct

SEQ ID NO: 12416 - DNA, 25 bp, Homo sapiens
caggaaagagctggagcaaaagctt

SEQ ID NO: 12417 - DNA, 25 bp, Homo sapiens
aggaaagagctggagcaaaagcttg

SEQ ID NO: 12418 - DNA, 25 bp, Homo sapiens
ggaaagagctggagcaaaagcttgg

SEQ ID NO: 12419 - DNA, 25 bp, Homo sapiens
gaaagagctggagcaaaagcttggg

SEQ ID NO: 12420 - DNA, 25 bp, Homo sapiens
aaagagctggagcaaaagcttgggg

SEQ ID NO: 12421 - DNA, 25 bp, Homo sapiens
aagagctggagcaaaagcttgggga

SEQ ID NO: 12422 - DNA, 25 bp, Homo sapiens
agagctggagcaaaagcttggggag

SEQ ID NO: 12423 - DNA, 25 bp, Homo sapiens
gagctggagcaaaagcttggggagt

SEQ ID NO: 12424 - DNA, 25 bp, Homo sapiens
agctggagcaaaagcttggggagtt

SEQ ID NO: 12425 - DNA, 25 bp, Homo sapiens
gctggagcaaaagcttggggagttg

SEQ ID NO: 12426 - DNA, 25 bp, Homo sapiens
ctggagcaaaagcttggggagttgc

SEQ ID NO: 12427 - DNA, 25 bp, Homo sapiens
tggagcaaaagcttggggagttgca

SEQ ID NO: 12428 - DNA, 25 bp, Homo sapiens
ggagcaaaagcttggggagttgcaa

SEQ ID NO: 12429 - DNA, 25 bp, Homo sapiens
gagcaaaagcttggggagttgcaaa

SEQ ID NO: 12430 - DNA, 25 bp, Homo sapiens
agcaaaagcttggggagttgcaaag

SEQ ID NO: 12431 - DNA, 25 bp, Homo sapiens
gcaaaagcttggggagttgcaaagt

SEQ ID NO: 12432 - DNA, 25 bp, Homo sapiens
caaaagcttggggagttgcaaagtg

SEQ ID NO: 12433 - DNA, 25 bp, Homo sapiens
aaaagcttggggagttgcaaagtgc

SEQ ID NO: 12434 - DNA, 25 bp, Homo sapiens
aaagcttggggagttgcaaagtgct

SEQ ID NO: 12435 - DNA, 25 bp, Homo sapiens
aagcttggggagttgcaaagtgctt

SEQ ID NO: 12436 - DNA, 25 bp, Homo sapiens
agcttggggagttgcaaagtgctta

SEQ ID NO: 12437 - DNA, 25 bp, Homo sapiens
gcttggggagttgcaaagtgcttat

SEQ ID NO: 12438 - DNA, 25 bp, Homo sapiens
cttggggagttgcaaagtgcttatg

SEQ ID NO: 12439 - DNA, 25 bp, Homo sapiens
ttggggagttgcaaagtgcttatga

SEQ ID NO: 12440 - DNA, 25 bp, Homo sapiens
tggggagttgcaaagtgcttatgac

SEQ ID NO: 12441 - DNA, 25 bp, Homo sapiens
ggggagttgcaaagtgcttatgacg

SEQ ID NO: 12442 - DNA, 25 bp, Homo sapiens
gggagttgcaaagtgcttatgacgg

SEQ ID NO: 12443 - DNA, 25 bp, Homo sapiens
ggagttgcaaagtgcttatgacggg

SEQ ID NO: 12444 - DNA, 25 bp, Homo sapiens
gagttgcaaagtgcttatgacgggg

SEQ ID NO: 12445 - DNA, 25 bp, Homo sapiens
agttgcaaagtgcttatgacggggc

SEQ ID NO: 12446 - DNA, 25 bp, Homo sapiens
gttgcaaagtgcttatgacggggcc

SEQ ID NO: 12447 - DNA, 25 bp, Homo sapiens
ttgcaaagtgcttatgacggggcca

SEQ ID NO: 12448 - DNA, 25 bp, Homo sapiens
tgcaaagtgcttatgacggggccaa

SEQ ID NO: 12449 - DNA, 25 bp, Homo sapiens
gcaaagtgcttatgacggggccaag

SEQ ID NO: 12450 - DNA, 25 bp, Homo sapiens
caaagtgcttatgacggggccaaga

SEQ ID NO: 12451 - DNA, 25 bp, Homo sapiens
aaagtgcttatgacggggccaagaa

SEQ ID NO: 12452 - DNA, 25 bp, Homo sapiens
aagtgcttatgacggggccaagaag

SEQ ID NO: 12453 - DNA, 25 bp, Homo sapiens
agtgcttatgacggggccaagaaga

SEQ ID NO: 12454 - DNA, 25 bp, Homo sapiens
gtgcttatgacggggccaagaagat

SEQ ID NO: 12455 - DNA, 25 bp, Homo sapiens
tgcttatgacggggccaagaagatg

SEQ ID NO: 12456 - DNA, 25 bp, Homo sapiens
gcttatgacggggccaagaagatgg

SEQ ID NO: 12457 - DNA, 25 bp, Homo sapiens
cttatgacggggccaagaagatggc

SEQ ID NO: 12458 - DNA, 25 bp, Homo sapiens
ttatgacggggccaagaagatggct

SEQ ID NO: 12459 - DNA, 25 bp, Homo sapiens
tatgacggggccaagaagatggctc

SEQ ID NO: 12460 - DNA, 25 bp, Homo sapiens
atgacggggccaagaagatggctca

SEQ ID NO: 12461 - DNA, 25 bp, Homo sapiens
tgacggggccaagaagatggctcac

SEQ ID NO: 12462 - DNA, 25 bp, Homo sapiens
gacggggccaagaagatggctcacc

SEQ ID NO: 12463 - DNA, 25 bp, Homo sapiens
acggggccaagaagatggctcacca

SEQ ID NO: 12464 - DNA, 25 bp, Homo sapiens
cggggccaagaagatggctcaccaa

SEQ ID NO: 12465 - DNA, 25 bp, Homo sapiens
ggggccaagaagatggctcaccaac

SEQ ID NO: 12466 - DNA, 25 bp, Homo sapiens
gggccaagaagatggctcaccaact

SEQ ID NO: 12467 - DNA, 25 bp, Homo sapiens
ggccaagaagatggctcaccaactg

SEQ ID NO: 12468 - DNA, 25 bp, Homo sapiens
gccaagaagatggctcaccaactga

SEQ ID NO: 12469 - DNA, 25 bp, Homo sapiens
ccaagaagatggctcaccaactgaa

SEQ ID NO: 12470 - DNA, 25 bp, Homo sapiens
caagaagatggctcaccaactgaag

SEQ ID NO: 12471 - DNA, 25 bp, Homo sapiens
aagaagatggctcaccaactgaaga

SEQ ID NO: 12472 - DNA, 25 bp, Homo sapiens
agaagatggctcaccaactgaagag

SEQ ID NO: 12473 - DNA, 25 bp, Homo sapiens
gaagatggctcaccaactgaagagg

SEQ ID NO: 12474 - DNA, 25 bp, Homo sapiens
aagatggctcaccaactgaagagga

SEQ ID NO: 12475 - DNA, 25 bp, Homo sapiens
agatggctcaccaactgaagaggaa

SEQ ID NO: 12476 - DNA, 25 bp, Homo sapiens
gatggctcaccaactgaagaggaag

SEQ ID NO: 12477 - DNA, 25 bp, Homo sapiens
atggctcaccaactgaagaggaagt

SEQ ID NO: 12478 - DNA, 25 bp, Homo sapiens
tggctcaccaactgaagaggaagtg

SEQ ID NO: 12479 - DNA, 25 bp, Homo sapiens
ggctcaccaactgaagaggaagtgc

SEQ ID NO: 12480 - DNA, 25 bp, Homo sapiens
gctcaccaactgaagaggaagtgcc

SEQ ID NO: 12481 - DNA, 25 bp, Homo sapiens
ctcaccaactgaagaggaagtgcca

SEQ ID NO: 12482 - DNA, 25 bp, Homo sapiens
tcaccaactgaagaggaagtgccac

SEQ ID NO: 12483 - DNA, 25 bp, Homo sapiens
caccaactgaagaggaagtgccacc

SEQ ID NO: 12484 - DNA, 25 bp, Homo sapiens
accaactgaagaggaagtgccacca

SEQ ID NO: 12485 - DNA, 25 bp, Homo sapiens
ccaactgaagaggaagtgccaccat

SEQ ID NO: 12486 - DNA, 25 bp, Homo sapiens
caactgaagaggaagtgccaccatc

SEQ ID NO: 12487 - DNA, 25 bp, Homo sapiens
aactgaagaggaagtgccaccatct

SEQ ID NO: 12488 - DNA, 25 bp, Homo sapiens
actgaagaggaagtgccaccatctt

SEQ ID NO: 12489 - DNA, 25 bp, Homo sapiens
ctgaagaggaagtgccaccatctta

SEQ ID NO: 12490 - DNA, 25 bp, Homo sapiens
tgaagaggaagtgccaccatcttac

SEQ ID NO: 12491 - DNA, 25 bp, Homo sapiens
gaagaggaagtgccaccatcttacc

SEQ ID NO: 12492 - DNA, 25 bp, Homo sapiens
aagaggaagtgccaccatcttacct

SEQ ID NO: 12493 - DNA, 25 bp, Homo sapiens
agaggaagtgccaccatcttacctg

SEQ ID NO: 12494 - DNA, 25 bp, Homo sapiens
gaggaagtgccaccatcttacctgt

SEQ ID NO: 12495 - DNA, 25 bp, Homo sapiens
aggaagtgccaccatcttacctgtg

SEQ ID NO: 12496 - DNA, 25 bp, Homo sapiens
ggaagtgccaccatcttacctgtga

SEQ ID NO: 12497 - DNA, 25 bp, Homo sapiens
gaagtgccaccatcttacctgtgac

SEQ ID NO: 12498 - DNA, 25 bp, Homo sapiens
aagtgccaccatcttacctgtgacc

SEQ ID NO: 12499 - DNA, 25 bp, Homo sapiens
agtgccaccatcttacctgtgacct

SEQ ID NO: 12500 - DNA, 25 bp, Homo sapiens
gtgccaccatcttacctgtgacctt

SEQ ID NO: 12501 - DNA, 25 bp, Homo sapiens
tgccaccatcttacctgtgaccttg

SEQ ID NO: 12502 - DNA, 25 bp, Homo sapiens
gccaccatcttacctgtgaccttga

SEQ ID NO: 12503 - DNA, 25 bp, Homo sapiens
ccaccatcttacctgtgaccttgag

SEQ ID NO: 12504 - DNA, 25 bp, Homo sapiens
caccatcttacctgtgaccttgagg

SEQ ID NO: 12505 - DNA, 25 bp, Homo sapiens
accatcttacctgtgaccttgagga

SEQ ID NO: 12506 - DNA, 25 bp, Homo sapiens
ccatcttacctgtgaccttgaggat

SEQ ID NO: 12507 - DNA, 25 bp, Homo sapiens
catcttacctgtgaccttgaggata

SEQ ID NO: 12508 - DNA, 25 bp, Homo sapiens
atcttacctgtgaccttgaggatac

SEQ ID NO: 12509 - DNA, 25 bp, Homo sapiens
tcttacctgtgaccttgaggatacc

SEQ ID NO: 12510 - DNA, 25 bp, Homo sapiens
cttacctgtgaccttgaggatacct

SEQ ID NO: 12511 - DNA, 25 bp, Homo sapiens
ttacctgtgaccttgaggatacctg

SEQ ID NO: 12512 - DNA, 25 bp, Homo sapiens
tacctgtgaccttgaggatacctgc

SEQ ID NO: 12513 - DNA, 25 bp, Homo sapiens
acctgtgaccttgaggatacctgcg

SEQ ID NO: 12514 - DNA, 25 bp, Homo sapiens
cctgtgaccttgaggatacctgcgt

SEQ ID NO: 12515 - DNA, 25 bp, Homo sapiens
ctgtgaccttgaggatacctgcgtc

SEQ ID NO: 12516 - DNA, 25 bp, Homo sapiens
tgtgaccttgaggatacctgcgtcc

SEQ ID NO: 12517 - DNA, 25 bp, Homo sapiens
gtgaccttgaggatacctgcgtcct

SEQ ID NO: 12518 - DNA, 25 bp, Homo sapiens
tgaccttgaggatacctgcgtcctg

SEQ ID NO: 12519 - DNA, 25 bp, Homo sapiens
gaccttgaggatacctgcgtcctgc

SEQ ID NO: 12520 - DNA, 25 bp, Homo sapiens
accttgaggatacctgcgtcctgct

SEQ ID NO: 12521 - DNA, 25 bp, Homo sapiens
ccttgaggatacctgcgtcctgcta

SEQ ID NO: 12522 - DNA, 25 bp, Homo sapiens
cttgaggatacctgcgtcctgctag

SEQ ID NO: 12523 - DNA, 25 bp, Homo sapiens
ttgaggatacctgcgtcctgctaga

SEQ ID NO: 12524 - DNA, 25 bp, Homo sapiens
tgaggatacctgcgtcctgctagag

SEQ ID NO: 12525 - DNA, 25 bp, Homo sapiens
gaggatacctgcgtcctgctagaga

SEQ ID NO: 12526 - DNA, 25 bp, Homo sapiens
aggatacctgcgtcctgctagagaa

SEQ ID NO: 12527 - DNA, 25 bp, Homo sapiens
ggatacctgcgtcctgctagagaac

SEQ ID NO: 12528 - DNA, 25 bp, Homo sapiens
gatacctgcgtcctgctagagaacc

SEQ ID NO: 12529 - DNA, 25 bp, Homo sapiens
atacctgcgtcctgctagagaacca

SEQ ID NO: 12530 - DNA, 25 bp, Homo sapiens
tacctgcgtcctgctagagaaccaa

SEQ ID NO: 12531 - DNA, 25 bp, Homo sapiens
acctgcgtcctgctagagaaccaac

SEQ ID NO: 12532 - DNA, 25 bp, Homo sapiens
cctgcgtcctgctagagaaccaaca

SEQ ID NO: 12533 - DNA, 25 bp, Homo sapiens
ctgcgtcctgctagagaaccaacaa

SEQ ID NO: 12534 - DNA, 25 bp, Homo sapiens
tgcgtcctgctagagaaccaacaaa

SEQ ID NO: 12535 - DNA, 25 bp, Homo sapiens
gcgtcctgctagagaaccaacaaag

SEQ ID NO: 12536 - DNA, 25 bp, Homo sapiens
cgtcctgctagagaaccaacaaagt

SEQ ID NO: 12537 - DNA, 25 bp, Homo sapiens
gtcctgctagagaaccaacaaagtc

SEQ ID NO: 12538 - DNA, 25 bp, Homo sapiens
tcctgctagagaaccaacaaagtcg

SEQ ID NO: 12539 - DNA, 25 bp, Homo sapiens
cctgctagagaaccaacaaagtcga

SEQ ID NO: 12540 - DNA, 25 bp, Homo sapiens
ctgctagagaaccaacaaagtcgaa

SEQ ID NO: 12541 - DNA, 25 bp, Homo sapiens
tgctagagaaccaacaaagtcgaaa

SEQ ID NO: 12542 - DNA, 25 bp, Homo sapiens
gctagagaaccaacaaagtcgaaac

SEQ ID NO: 12543 - DNA, 25 bp, Homo sapiens
ctagagaaccaacaaagtcgaaacc

SEQ ID NO: 12544 - DNA, 25 bp, Homo sapiens
tagagaaccaacaaagtcgaaacca

SEQ ID NO: 12545 - DNA, 25 bp, Homo sapiens
agagaaccaacaaagtcgaaaccat

SEQ ID NO: 12546 - DNA, 25 bp, Homo sapiens
gagaaccaacaaagtcgaaaccatg

SEQ ID NO: 12547 - DNA, 25 bp, Homo sapiens
agaaccaacaaagtcgaaaccatga

SEQ ID NO: 12548 - DNA, 25 bp, Homo sapiens
gaaccaacaaagtcgaaaccatgag

SEQ ID NO: 12549 - DNA, 25 bp, Homo sapiens
aaccaacaaagtcgaaaccatgagc

SEQ ID NO: 12550 - DNA, 25 bp, Homo sapiens
accaacaaagtcgaaaccatgagct

SEQ ID NO: 12551 - DNA, 25 bp, Homo sapiens
ccaacaaagtcgaaaccatgagctg

SEQ ID NO: 12552 - DNA, 25 bp, Homo sapiens
caacaaagtcgaaaccatgagctgg

SEQ ID NO: 12553 - DNA, 25 bp, Homo sapiens
aacaaagtcgaaaccatgagctgga

SEQ ID NO: 12554 - DNA, 25 bp, Homo sapiens
acaaagtcgaaaccatgagctggag

SEQ ID NO: 12555 - DNA, 25 bp, Homo sapiens
caaagtcgaaaccatgagctggaga

SEQ ID NO: 12556 - DNA, 25 bp, Homo sapiens
aaagtcgaaaccatgagctggagaa

SEQ ID NO: 12557 - DNA, 25 bp, Homo sapiens
aagtcgaaaccatgagctggagaag

SEQ ID NO: 12558 - DNA, 25 bp, Homo sapiens
agtcgaaaccatgagctggagaaga

SEQ ID NO: 12559 - DNA, 25 bp, Homo sapiens
gtcgaaaccatgagctggagaagaa

SEQ ID NO: 12560 - DNA, 25 bp, Homo sapiens
tcgaaaccatgagctggagaagaag

SEQ ID NO: 12561 - DNA, 25 bp, Homo sapiens
cgaaaccatgagctggagaagaagc

SEQ ID NO: 12562 - DNA, 25 bp, Homo sapiens
gaaaccatgagctggagaagaagca

SEQ ID NO: 12563 - DNA, 25 bp, Homo sapiens
aaaccatgagctggagaagaagcag

SEQ ID NO: 12564 - DNA, 25 bp, Homo sapiens
aaccatgagctggagaagaagcaga

SEQ ID NO: 12565 - DNA, 25 bp, Homo sapiens
accatgagctggagaagaagcagaa

SEQ ID NO: 12566 - DNA, 25 bp, Homo sapiens
ccatgagctggagaagaagcagaag

SEQ ID NO: 12567 - DNA, 25 bp, Homo sapiens
catgagctggagaagaagcagaaga

SEQ ID NO: 12568 - DNA, 25 bp, Homo sapiens
atgagctggagaagaagcagaagaa

SEQ ID NO: 12569 - DNA, 25 bp, Homo sapiens
tgagctggagaagaagcagaagaag

SEQ ID NO: 12570 - DNA, 25 bp, Homo sapiens
gagctggagaagaagcagaagaagt

SEQ ID NO: 12571 - DNA, 25 bp, Homo sapiens
agctggagaagaagcagaagaagtt

SEQ ID NO: 12572 - DNA, 25 bp, Homo sapiens
gctggagaagaagcagaagaagttt

SEQ ID NO: 12573 - DNA, 25 bp, Homo sapiens
ctggagaagaagcagaagaagtttg

SEQ ID NO: 12574 - DNA, 25 bp, Homo sapiens
tggagaagaagcagaagaagtttga

SEQ ID NO: 12575 - DNA, 25 bp, Homo sapiens
ggagaagaagcagaagaagtttgac

SEQ ID NO: 12576 - DNA, 25 bp, Homo sapiens
gagaagaagcagaagaagtttgacc

SEQ ID NO: 12577 - DNA, 25 bp, Homo sapiens
agaagaagcagaagaagtttgacct

SEQ ID NO: 12578 - DNA, 25 bp, Homo sapiens
gaagaagcagaagaagtttgacctg

SEQ ID NO: 12579 - DNA, 25 bp, Homo sapiens
aagaagcagaagaagtttgacctgc

SEQ ID NO: 12580 - DNA, 25 bp, Homo sapiens
agaagcagaagaagtttgacctgca

SEQ ID NO: 12581 - DNA, 25 bp, Homo sapiens
gaagcagaagaagtttgacctgcag

SEQ ID NO: 12582 - DNA, 25 bp, Homo sapiens
aagcagaagaagtttgacctgcagc

SEQ ID NO: 12583 - DNA, 25 bp, Homo sapiens
agcagaagaagtttgacctgcagct

SEQ ID NO: 12584 - DNA, 25 bp, Homo sapiens
gcagaagaagtttgacctgcagctg

SEQ ID NO: 12585 - DNA, 25 bp, Homo sapiens
cagaagaagtttgacctgcagctgg

SEQ ID NO: 12586 - DNA, 25 bp, Homo sapiens
agaagaagtttgacctgcagctggc

SEQ ID NO: 12587 - DNA, 25 bp, Homo sapiens
gaagaagtttgacctgcagctggcc

SEQ ID NO: 12588 - DNA, 25 bp, Homo sapiens
aagaagtttgacctgcagctggccc

SEQ ID NO: 12589 - DNA, 25 bp, Homo sapiens
agaagtttgacctgcagctggccca

SEQ ID NO: 12590 - DNA, 25 bp, Homo sapiens
gaagtttgacctgcagctggcccag

SEQ ID NO: 12591 - DNA, 25 bp, Homo sapiens
aagtttgacctgcagctggcccagg

SEQ ID NO: 12592 - DNA, 25 bp, Homo sapiens
agtttgacctgcagctggcccaggc

SEQ ID NO: 12593 - DNA, 25 bp, Homo sapiens
gtttgacctgcagctggcccaggcc

SEQ ID NO: 12594 - DNA, 25 bp, Homo sapiens
tttgacctgcagctggcccaggccc

SEQ ID NO: 12595 - DNA, 25 bp, Homo sapiens
ttgacctgcagctggcccaggccct

SEQ ID NO: 12596 - DNA, 25 bp, Homo sapiens
tgacctgcagctggcccaggcccta

SEQ ID NO: 12597 - DNA, 25 bp, Homo sapiens
gacctgcagctggcccaggccctag

SEQ ID NO: 12598 - DNA, 25 bp, Homo sapiens
acctgcagctggcccaggccctagg

SEQ ID NO: 12599 - DNA, 25 bp, Homo sapiens
cctgcagctggcccaggccctaggt

SEQ ID NO: 12600 - DNA, 25 bp, Homo sapiens
ctgcagctggcccaggccctaggtg

SEQ ID NO: 12601 - DNA, 25 bp, Homo sapiens
tgcagctggcccaggccctaggtga

SEQ ID NO: 12602 - DNA, 25 bp, Homo sapiens
gcagctggcccaggccctaggtgag

SEQ ID NO: 12603 - DNA, 25 bp, Homo sapiens
cagctggcccaggccctaggtgagt

SEQ ID NO: 12604 - DNA, 25 bp, Homo sapiens
agctggcccaggccctaggtgagtc

SEQ ID NO: 12605 - DNA, 25 bp, Homo sapiens
gctggcccaggccctaggtgagtca

SEQ ID NO: 12606 - DNA, 25 bp, Homo sapiens
ctggcccaggccctaggtgagtcag

SEQ ID NO: 12607 - DNA, 25 bp, Homo sapiens
tggcccaggccctaggtgagtcagt

SEQ ID NO: 12608 - DNA, 25 bp, Homo sapiens
ggcccaggccctaggtgagtcagtg

SEQ ID NO: 12609 - DNA, 25 bp, Homo sapiens
gcccaggccctaggtgagtcagtgt

SEQ ID NO: 12610 - DNA, 25 bp, Homo sapiens
cccaggccctaggtgagtcagtgtt

SEQ ID NO: 12611 - DNA, 25 bp, Homo sapiens
ccaggccctaggtgagtcagtgttt

SEQ ID NO: 12612 - DNA, 25 bp, Homo sapiens
caggccctaggtgagtcagtgtttg

SEQ ID NO: 12613 - DNA, 25 bp, Homo sapiens
aggccctaggtgagtcagtgtttga

SEQ ID NO: 12614 - DNA, 25 bp, Homo sapiens
ggccctaggtgagtcagtgtttgag

SEQ ID NO: 12615 - DNA, 25 bp, Homo sapiens
gccctaggtgagtcagtgtttgaga

SEQ ID NO: 12616 - DNA, 25 bp, Homo sapiens
ccctaggtgagtcagtgtttgagaa

SEQ ID NO: 12617 - DNA, 25 bp, Homo sapiens
cctaggtgagtcagtgtttgagaag

SEQ ID NO: 12618 - DNA, 25 bp, Homo sapiens
ctaggtgagtcagtgtttgagaagg

SEQ ID NO: 12619 - DNA, 25 bp, Homo sapiens
taggtgagtcagtgtttgagaaggg

SEQ ID NO: 12620 - DNA, 25 bp, Homo sapiens
aggtgagtcagtgtttgagaagggt

SEQ ID NO: 12621 - DNA, 25 bp, Homo sapiens
ggtgagtcagtgtttgagaagggtc

SEQ ID NO: 12622 - DNA, 25 bp, Homo sapiens
gtgagtcagtgtttgagaagggtct

SEQ ID NO: 12623 - DNA, 25 bp, Homo sapiens
tgagtcagtgtttgagaagggtctc

SEQ ID NO: 12624 - DNA, 25 bp, Homo sapiens
gagtcagtgtttgagaagggtctcc

SEQ ID NO: 12625 - DNA, 25 bp, Homo sapiens
agtcagtgtttgagaagggtctccg

SEQ ID NO: 12626 - DNA, 25 bp, Homo sapiens
gtcagtgtttgagaagggtctccgt

SEQ ID NO: 12627 - DNA, 25 bp, Homo sapiens
tcagtgtttgagaagggtctccgtg

SEQ ID NO: 12628 - DNA, 25 bp, Homo sapiens
cagtgtttgagaagggtctccgtga

SEQ ID NO: 12629 - DNA, 25 bp, Homo sapiens
agtgtttgagaagggtctccgtgag

SEQ ID NO: 12630 - DNA, 25 bp, Homo sapiens
gtgtttgagaagggtctccgtgaga

SEQ ID NO: 12631 - DNA, 25 bp, Homo sapiens
tgtttgagaagggtctccgtgagaa

SEQ ID NO: 12632 - DNA, 25 bp, Homo sapiens
gtttgagaagggtctccgtgagaaa

SEQ ID NO: 12633 - DNA, 25 bp, Homo sapiens
tttgagaagggtctccgtgagaaag

SEQ ID NO: 12634 - DNA, 25 bp, Homo sapiens
ttgagaagggtctccgtgagaaagt

SEQ ID NO: 12635 - DNA, 25 bp, Homo sapiens
tgagaagggtctccgtgagaaagtg

SEQ ID NO: 12636 - DNA, 25 bp, Homo sapiens
gagaagggtctccgtgagaaagtga

SEQ ID NO: 12637 - DNA, 25 bp, Homo sapiens
agaagggtctccgtgagaaagtgac

SEQ ID NO: 12638 - DNA, 25 bp, Homo sapiens
gaagggtctccgtgagaaagtgacc

SEQ ID NO: 12639 - DNA, 25 bp, Homo sapiens
aagggtctccgtgagaaagtgaccc

SEQ ID NO: 12640 - DNA, 25 bp, Homo sapiens
agggtctccgtgagaaagtgaccca

SEQ ID NO: 12641 - DNA, 25 bp, Homo sapiens
gggtctccgtgagaaagtgacccag

SEQ ID NO: 12642 - DNA, 25 bp, Homo sapiens
ggtctccgtgagaaagtgacccagg

SEQ ID NO: 12643 - DNA, 25 bp, Homo sapiens
gtctccgtgagaaagtgacccagga

SEQ ID NO: 12644 - DNA, 25 bp, Homo sapiens
tctccgtgagaaagtgacccaggag

SEQ ID NO: 12645 - DNA, 25 bp, Homo sapiens
ctccgtgagaaagtgacccaggaga

SEQ ID NO: 12646 - DNA, 25 bp, Homo sapiens
tccgtgagaaagtgacccaggagaa

SEQ ID NO: 12647 - DNA, 25 bp, Homo sapiens
ccgtgagaaagtgacccaggagaac

SEQ ID NO: 12648 - DNA, 25 bp, Homo sapiens
cgtgagaaagtgacccaggagaaca

SEQ ID NO: 12649 - DNA, 25 bp, Homo sapiens
gtgagaaagtgacccaggagaacac

SEQ ID NO: 12650 - DNA, 25 bp, Homo sapiens
tgagaaagtgacccaggagaacacc

SEQ ID NO: 12651 - DNA, 25 bp, Homo sapiens
gagaaagtgacccaggagaacacca

SEQ ID NO: 12652 - DNA, 25 bp, Homo sapiens
agaaagtgacccaggagaacaccag

SEQ ID NO: 12653 - DNA, 25 bp, Homo sapiens
gaaagtgacccaggagaacaccagt

SEQ ID NO: 12654 - DNA, 25 bp, Homo sapiens
aaagtgacccaggagaacaccagtg

SEQ ID NO: 12655 - DNA, 25 bp, Homo sapiens
aagtgacccaggagaacaccagtgt

SEQ ID NO: 12656 - DNA, 25 bp, Homo sapiens
agtgacccaggagaacaccagtgtc

SEQ ID NO: 12657 - DNA, 25 bp, Homo sapiens
gtgacccaggagaacaccagtgtcc

SEQ ID NO: 12658 - DNA, 25 bp, Homo sapiens
tgacccaggagaacaccagtgtccg

SEQ ID NO: 12659 - DNA, 25 bp, Homo sapiens
gacccaggagaacaccagtgtccgg

SEQ ID NO: 12660 - DNA, 25 bp, Homo sapiens
acccaggagaacaccagtgtccggt

SEQ ID NO: 12661 - DNA, 25 bp, Homo sapiens
cccaggagaacaccagtgtccggtg

SEQ ID NO: 12662 - DNA, 25 bp, Homo sapiens
ccaggagaacaccagtgtccggtgg

SEQ ID NO: 12663 - DNA, 25 bp, Homo sapiens
caggagaacaccagtgtccggtggg

SEQ ID NO: 12664 - DNA, 25 bp, Homo sapiens
aggagaacaccagtgtccggtggga

SEQ ID NO: 12665 - DNA, 25 bp, Homo sapiens
ggagaacaccagtgtccggtgggag

SEQ ID NO: 12666 - DNA, 25 bp, Homo sapiens
gagaacaccagtgtccggtgggagc

SEQ ID NO: 12667 - DNA, 25 bp, Homo sapiens
agaacaccagtgtccggtgggagct

SEQ ID NO: 12668 - DNA, 25 bp, Homo sapiens
gaacaccagtgtccggtgggagcta

SEQ ID NO: 12669 - DNA, 25 bp, Homo sapiens
aacaccagtgtccggtgggagctag

SEQ ID NO: 12670 - DNA, 25 bp, Homo sapiens
acaccagtgtccggtgggagctagg

SEQ ID NO: 12671 - DNA, 25 bp, Homo sapiens
caccagtgtccggtgggagctaggc

SEQ ID NO: 12672 - DNA, 25 bp, Homo sapiens
accagtgtccggtgggagctaggcc

SEQ ID NO: 12673 - DNA, 25 bp, Homo sapiens
ccagtgtccggtgggagctaggcca

SEQ ID NO: 12674 - DNA, 25 bp, Homo sapiens
cagtgtccggtgggagctaggccag

SEQ ID NO: 12675 - DNA, 25 bp, Homo sapiens
agtgtccggtgggagctaggccagc

SEQ ID NO: 12676 - DNA, 25 bp, Homo sapiens
gtgtccggtgggagctaggccagct

SEQ ID NO: 12677 - DNA, 25 bp, Homo sapiens
tgtccggtgggagctaggccagctt

SEQ ID NO: 12678 - DNA, 25 bp, Homo sapiens
gtccggtgggagctaggccagcttc

SEQ ID NO: 12679 - DNA, 25 bp, Homo sapiens
tccggtgggagctaggccagcttca

SEQ ID NO: 12680 - DNA, 25 bp, Homo sapiens
ccggtgggagctaggccagcttcag

SEQ ID NO: 12681 - DNA, 25 bp, Homo sapiens
cggtgggagctaggccagcttcagc

SEQ ID NO: 12682 - DNA, 25 bp, Homo sapiens
ggtgggagctaggccagcttcagca

SEQ ID NO: 12683 - DNA, 25 bp, Homo sapiens
gtgggagctaggccagcttcagcag

SEQ ID NO: 12684 - DNA, 25 bp, Homo sapiens
tgggagctaggccagcttcagcagc

SEQ ID NO: 12685 - DNA, 25 bp, Homo sapiens
gggagctaggccagcttcagcagca

SEQ ID NO: 12686 - DNA, 25 bp, Homo sapiens
ggagctaggccagcttcagcagcag

SEQ ID NO: 12687 - DNA, 25 bp, Homo sapiens
gagctaggccagcttcagcagcagc

SEQ ID NO: 12688 - DNA, 25 bp, Homo sapiens
agctaggccagcttcagcagcagct

SEQ ID NO: 12689 - DNA, 25 bp, Homo sapiens
gctaggccagcttcagcagcagctg

SEQ ID NO: 12690 - DNA, 25 bp, Homo sapiens
ctaggccagcttcagcagcagctga

SEQ ID NO: 12691 - DNA, 25 bp, Homo sapiens
taggccagcttcagcagcagctgaa

SEQ ID NO: 12692 - DNA, 25 bp, Homo sapiens
aggccagcttcagcagcagctgaag

SEQ ID NO: 12693 - DNA, 25 bp, Homo sapiens
ggccagcttcagcagcagctgaagc

SEQ ID NO: 12694 - DNA, 25 bp, Homo sapiens
gccagcttcagcagcagctgaagca

SEQ ID NO: 12695 - DNA, 25 bp, Homo sapiens
ccagcttcagcagcagctgaagcaa

SEQ ID NO: 12696 - DNA, 25 bp, Homo sapiens
cagcttcagcagcagctgaagcaaa

SEQ ID NO: 12697 - DNA, 25 bp, Homo sapiens
agcttcagcagcagctgaagcaaaa

SEQ ID NO: 12698 - DNA, 25 bp, Homo sapiens
gcttcagcagcagctgaagcaaaag

SEQ ID NO: 12699 - DNA, 25 bp, Homo sapiens
cttcagcagcagctgaagcaaaagg

SEQ ID NO: 12700 - DNA, 25 bp, Homo sapiens
ttcagcagcagctgaagcaaaagga

SEQ ID NO: 12701 - DNA, 25 bp, Homo sapiens
tcagcagcagctgaagcaaaaggag

SEQ ID NO: 12702 - DNA, 25 bp, Homo sapiens
cagcagcagctgaagcaaaaggagc

SEQ ID NO: 12703 - DNA, 25 bp, Homo sapiens
agcagcagctgaagcaaaaggagca

SEQ ID NO: 12704 - DNA, 25 bp, Homo sapiens
gcagcagctgaagcaaaaggagcag

SEQ ID NO: 12705 - DNA, 25 bp, Homo sapiens
cagcagctgaagcaaaaggagcagg

SEQ ID NO: 12706 - DNA, 25 bp, Homo sapiens
agcagctgaagcaaaaggagcagga

SEQ ID NO: 12707 - DNA, 25 bp, Homo sapiens
gcagctgaagcaaaaggagcaggaa

SEQ ID NO: 12708 - DNA, 25 bp, Homo sapiens
cagctgaagcaaaaggagcaggaag

SEQ ID NO: 12709 - DNA, 25 bp, Homo sapiens
agctgaagcaaaaggagcaggaagc

SEQ ID NO: 12710 - DNA, 25 bp, Homo sapiens
gctgaagcaaaaggagcaggaagcc

SEQ ID NO: 12711 - DNA, 25 bp, Homo sapiens
ctgaagcaaaaggagcaggaagcct

SEQ ID NO: 12712 - DNA, 25 bp, Homo sapiens
tgaagcaaaaggagcaggaagcctc

SEQ ID NO: 12713 - DNA, 25 bp, Homo sapiens
gaagcaaaaggagcaggaagcctca

SEQ ID NO: 12714 - DNA, 25 bp, Homo sapiens
aagcaaaaggagcaggaagcctcac

SEQ ID NO: 12715 - DNA, 25 bp, Homo sapiens
agcaaaaggagcaggaagcctcaca

SEQ ID NO: 12716 - DNA, 25 bp, Homo sapiens
gcaaaaggagcaggaagcctcacag

SEQ ID NO: 12717 - DNA, 25 bp, Homo sapiens
caaaaggagcaggaagcctcacagc

SEQ ID NO: 12718 - DNA, 25 bp, Homo sapiens
aaaaggagcaggaagcctcacagct

SEQ ID NO: 12719 - DNA, 25 bp, Homo sapiens
aaaggagcaggaagcctcacagctg

SEQ ID NO: 12720 - DNA, 25 bp, Homo sapiens
aaggagcaggaagcctcacagctga

SEQ ID NO: 12721 - DNA, 25 bp, Homo sapiens
aggagcaggaagcctcacagctgaa

SEQ ID NO: 12722 - DNA, 25 bp, Homo sapiens
ggagcaggaagcctcacagctgaag

SEQ ID NO: 12723 - DNA, 25 bp, Homo sapiens
gagcaggaagcctcacagctgaagc

SEQ ID NO: 12724 - DNA, 25 bp, Homo sapiens
agcaggaagcctcacagctgaagca

SEQ ID NO: 12725 - DNA, 25 bp, Homo sapiens
gcaggaagcctcacagctgaagcag

SEQ ID NO: 12726 - DNA, 25 bp, Homo sapiens
caggaagcctcacagctgaagcagc

SEQ ID NO: 12727 - DNA, 25 bp, Homo sapiens
aggaagcctcacagctgaagcagca

SEQ ID NO: 12728 - DNA, 25 bp, Homo sapiens
ggaagcctcacagctgaagcagcag

SEQ ID NO: 12729 - DNA, 25 bp, Homo sapiens
gaagcctcacagctgaagcagcagg

SEQ ID NO: 12730 - DNA, 25 bp, Homo sapiens
aagcctcacagctgaagcagcaggt

SEQ ID NO: 12731 - DNA, 25 bp, Homo sapiens
agcctcacagctgaagcagcaggtg

SEQ ID NO: 12732 - DNA, 25 bp, Homo sapiens
gcctcacagctgaagcagcaggtgg

SEQ ID NO: 12733 - DNA, 25 bp, Homo sapiens
cctcacagctgaagcagcaggtgga

SEQ ID NO: 12734 - DNA, 25 bp, Homo sapiens
ctcacagctgaagcagcaggtggag

SEQ ID NO: 12735 - DNA, 25 bp, Homo sapiens
tcacagctgaagcagcaggtggaga

SEQ ID NO: 12736 - DNA, 25 bp, Homo sapiens
cacagctgaagcagcaggtggagat

SEQ ID NO: 12737 - DNA, 25 bp, Homo sapiens
acagctgaagcagcaggtggagatg

SEQ ID NO: 12738 - DNA, 25 bp, Homo sapiens
cagctgaagcagcaggtggagatgc

SEQ ID NO: 12739 - DNA, 25 bp, Homo sapiens
agctgaagcagcaggtggagatgct

SEQ ID NO: 12740 - DNA, 25 bp, Homo sapiens
gctgaagcagcaggtggagatgcta

SEQ ID NO: 12741 - DNA, 25 bp, Homo sapiens
ctgaagcagcaggtggagatgctac

SEQ ID NO: 12742 - DNA, 25 bp, Homo sapiens
tgaagcagcaggtggagatgctaca

SEQ ID NO: 12743 - DNA, 25 bp, Homo sapiens
gaagcagcaggtggagatgctacag

SEQ ID NO: 12744 - DNA, 25 bp, Homo sapiens
aagcagcaggtggagatgctacagg

SEQ ID NO: 12745 - DNA, 25 bp, Homo sapiens
agcagcaggtggagatgctacagga

SEQ ID NO: 12746 - DNA, 25 bp, Homo sapiens
gcagcaggtggagatgctacaggac

SEQ ID NO: 12747 - DNA, 25 bp, Homo sapiens
cagcaggtggagatgctacaggacc

SEQ ID NO: 12748 - DNA, 25 bp, Homo sapiens
agcaggtggagatgctacaggacca

SEQ ID NO: 12749 - DNA, 25 bp, Homo sapiens
gcaggtggagatgctacaggaccat

SEQ ID NO: 12750 - DNA, 25 bp, Homo sapiens
caggtggagatgctacaggaccata

SEQ ID NO: 12751 - DNA, 25 bp, Homo sapiens
aggtggagatgctacaggaccataa

SEQ ID NO: 12752 - DNA, 25 bp, Homo sapiens
ggtggagatgctacaggaccataaa

SEQ ID NO: 12753 - DNA, 25 bp, Homo sapiens
gtggagatgctacaggaccataaac

SEQ ID NO: 12754 - DNA, 25 bp, Homo sapiens
tggagatgctacaggaccataaacg

SEQ ID NO: 12755 - DNA, 25 bp, Homo sapiens
ggagatgctacaggaccataaacgg

SEQ ID NO: 12756 - DNA, 25 bp, Homo sapiens
gagatgctacaggaccataaacggg

SEQ ID NO: 12757 - DNA, 25 bp, Homo sapiens
agatgctacaggaccataaacggga

SEQ ID NO: 12758 - DNA, 25 bp, Homo sapiens
gatgctacaggaccataaacgggag

SEQ ID NO: 12759 - DNA, 25 bp, Homo sapiens
atgctacaggaccataaacgggagc

SEQ ID NO: 12760 - DNA, 25 bp, Homo sapiens
tgctacaggaccataaacgggagct

SEQ ID NO: 12761 - DNA, 25 bp, Homo sapiens
gctacaggaccataaacgggagctg

SEQ ID NO: 12762 - DNA, 25 bp, Homo sapiens
ctacaggaccataaacgggagctgc

SEQ ID NO: 12763 - DNA, 25 bp, Homo sapiens
tacaggaccataaacgggagctgct

SEQ ID NO: 12764 - DNA, 25 bp, Homo sapiens
acaggaccataaacgggagctgctg

SEQ ID NO: 12765 - DNA, 25 bp, Homo sapiens
caggaccataaacgggagctgctgg

SEQ ID NO: 12766 - DNA, 25 bp, Homo sapiens
aggaccataaacgggagctgctggg

SEQ ID NO: 12767 - DNA, 25 bp, Homo sapiens
ggaccataaacgggagctgctgggg

SEQ ID NO: 12768 - DNA, 25 bp, Homo sapiens
gaccataaacgggagctgctggggt

SEQ ID NO: 12769 - DNA, 25 bp, Homo sapiens
accataaacgggagctgctggggtc

SEQ ID NO: 12770 - DNA, 25 bp, Homo sapiens
ccataaacgggagctgctggggtca

SEQ ID NO: 12771 - DNA, 25 bp, Homo sapiens
cataaacgggagctgctggggtcac

SEQ ID NO: 12772 - DNA, 25 bp, Homo sapiens
ataaacgggagctgctggggtcacc

SEQ ID NO: 12773 - DNA, 25 bp, Homo sapiens
taaacgggagctgctggggtcaccc

SEQ ID NO: 12774 - DNA, 25 bp, Homo sapiens
aaacgggagctgctggggtcaccct

SEQ ID NO: 12775 - DNA, 25 bp, Homo sapiens
aacgggagctgctggggtcaccctc

SEQ ID NO: 12776 - DNA, 25 bp, Homo sapiens
acgggagctgctggggtcaccctct

SEQ ID NO: 12777 - DNA, 25 bp, Homo sapiens
cgggagctgctggggtcaccctctc

SEQ ID NO: 12778 - DNA, 25 bp, Homo sapiens
gggagctgctggggtcaccctctct

SEQ ID NO: 12779 - DNA, 25 bp, Homo sapiens
ggagctgctggggtcaccctctctg

SEQ ID NO: 12780 - DNA, 25 bp, Homo sapiens
gagctgctggggtcaccctctctgg

SEQ ID NO: 12781 - DNA, 25 bp, Homo sapiens
agctgctggggtcaccctctctggg

SEQ ID NO: 12782 - DNA, 25 bp, Homo sapiens
gctgctggggtcaccctctctgggg

SEQ ID NO: 12783 - DNA, 25 bp, Homo sapiens
ctgctggggtcaccctctctggggg

SEQ ID NO: 12784 - DNA, 25 bp, Homo sapiens
tgctggggtcaccctctctggggga

SEQ ID NO: 12785 - DNA, 25 bp, Homo sapiens
gctggggtcaccctctctgggggaa

SEQ ID NO: 12786 - DNA, 25 bp, Homo sapiens
ctggggtcaccctctctgggggaaa

SEQ ID NO: 12787 - DNA, 25 bp, Homo sapiens
tggggtcaccctctctgggggaaaa

SEQ ID NO: 12788 - DNA, 25 bp, Homo sapiens
ggggtcaccctctctgggggaaaat

SEQ ID NO: 12789 - DNA, 25 bp, Homo sapiens
gggtcaccctctctgggggaaaatt

SEQ ID NO: 12790 - DNA, 25 bp, Homo sapiens
ggtcaccctctctgggggaaaattg

SEQ ID NO: 12791 - DNA, 25 bp, Homo sapiens
gtcaccctctctgggggaaaattgc

SEQ ID NO: 12792 - DNA, 25 bp, Homo sapiens
tcaccctctctgggggaaaattgcg

SEQ ID NO: 12793 - DNA, 25 bp, Homo sapiens
caccctctctgggggaaaattgcgt

SEQ ID NO: 12794 - DNA, 25 bp, Homo sapiens
accctctctgggggaaaattgcgtt

SEQ ID NO: 12795 - DNA, 25 bp, Homo sapiens
ccctctctgggggaaaattgcgttg

SEQ ID NO: 12796 - DNA, 25 bp, Homo sapiens
cctctctgggggaaaattgcgttgc

SEQ ID NO: 12797 - DNA, 25 bp, Homo sapiens
ctctctgggggaaaattgcgttgct

SEQ ID NO: 12798 - DNA, 25 bp, Homo sapiens
tctctgggggaaaattgcgttgctg

SEQ ID NO: 12799 - DNA, 25 bp, Homo sapiens
ctctgggggaaaattgcgttgctgg

SEQ ID NO: 12800 - DNA, 25 bp, Homo sapiens
tctgggggaaaattgcgttgctggc

SEQ ID NO: 12801 - DNA, 25 bp, Homo sapiens
ctgggggaaaattgcgttgctggct

SEQ ID NO: 12802 - DNA, 25 bp, Homo sapiens
tgggggaaaattgcgttgctggctt

SEQ ID NO: 12803 - DNA, 25 bp, Homo sapiens
gggggaaaattgcgttgctggcttg

SEQ ID NO: 12804 - DNA, 25 bp, Homo sapiens
ggggaaaattgcgttgctggcttga

SEQ ID NO: 12805 - DNA, 25 bp, Homo sapiens
gggaaaattgcgttgctggcttgaa

SEQ ID NO: 12806 - DNA, 25 bp, Homo sapiens
ggaaaattgcgttgctggcttgaag

SEQ ID NO: 12807 - DNA, 25 bp, Homo sapiens
gaaaattgcgttgctggcttgaagg

SEQ ID NO: 12808 - DNA, 25 bp, Homo sapiens
aaaattgcgttgctggcttgaagga

SEQ ID NO: 12809 - DNA, 25 bp, Homo sapiens
aaattgcgttgctggcttgaaggag

SEQ ID NO: 12810 - DNA, 25 bp, Homo sapiens
aattgcgttgctggcttgaaggaga

SEQ ID NO: 12811 - DNA, 25 bp, Homo sapiens
attgcgttgctggcttgaaggagag

SEQ ID NO: 12812 - DNA, 25 bp, Homo sapiens
ttgcgttgctggcttgaaggagagg

SEQ ID NO: 12813 - DNA, 25 bp, Homo sapiens
tgcgttgctggcttgaaggagaggc

SEQ ID NO: 12814 - DNA, 25 bp, Homo sapiens
gcgttgctggcttgaaggagaggct

SEQ ID NO: 12815 - DNA, 25 bp, Homo sapiens
cgttgctggcttgaaggagaggctc

SEQ ID NO: 12816 - DNA, 25 bp, Homo sapiens
gttgctggcttgaaggagaggctct

SEQ ID NO: 12817 - DNA, 25 bp, Homo sapiens
ttgctggcttgaaggagaggctctg

SEQ ID NO: 12818 - DNA, 25 bp, Homo sapiens
tgctggcttgaaggagaggctctgg

SEQ ID NO: 12819 - DNA, 25 bp, Homo sapiens
gctggcttgaaggagaggctctgga

SEQ ID NO: 12820 - DNA, 25 bp, Homo sapiens
ctggcttgaaggagaggctctggaa

SEQ ID NO: 12821 - DNA, 25 bp, Homo sapiens
tggcttgaaggagaggctctggaag

SEQ ID NO: 12822 - DNA, 25 bp, Homo sapiens
ggcttgaaggagaggctctggaagt

SEQ ID NO: 12823 - DNA, 25 bp, Homo sapiens
gcttgaaggagaggctctggaagtt

SEQ ID NO: 12824 - DNA, 25 bp, Homo sapiens
cttgaaggagaggctctggaagttg

SEQ ID NO: 12825 - DNA, 25 bp, Homo sapiens
ttgaaggagaggctctggaagttgg

SEQ ID NO: 12826 - DNA, 25 bp, Homo sapiens
tgaaggagaggctctggaagttgga

SEQ ID NO: 12827 - DNA, 25 bp, Homo sapiens
gaaggagaggctctggaagttggaa

SEQ ID NO: 12828 - DNA, 25 bp, Homo sapiens
aaggagaggctctggaagttggaat

SEQ ID NO: 12829 - DNA, 25 bp, Homo sapiens
aggagaggctctggaagttggaatc

SEQ ID NO: 12830 - DNA, 25 bp, Homo sapiens
ggagaggctctggaagttggaatcc

SEQ ID NO: 12831 - DNA, 25 bp, Homo sapiens
gagaggctctggaagttggaatcca

SEQ ID NO: 12832 - DNA, 25 bp, Homo sapiens
agaggctctggaagttggaatccag

SEQ ID NO: 12833 - DNA, 25 bp, Homo sapiens
gaggctctggaagttggaatccagc

SEQ ID NO: 12834 - DNA, 25 bp, Homo sapiens
aggctctggaagttggaatccagcg

SEQ ID NO: 12835 - DNA, 25 bp, Homo sapiens
ggctctggaagttggaatccagcgc

SEQ ID NO: 12836 - DNA, 25 bp, Homo sapiens
gctctggaagttggaatccagcgcc

SEQ ID NO: 12837 - DNA, 25 bp, Homo sapiens
ctctggaagttggaatccagcgccc

SEQ ID NO: 12838 - DNA, 25 bp, Homo sapiens
tctggaagttggaatccagcgccct

SEQ ID NO: 12839 - DNA, 25 bp, Homo sapiens
ctggaagttggaatccagcgccctt

SEQ ID NO: 12840 - DNA, 25 bp, Homo sapiens
tggaagttggaatccagcgcccttg

SEQ ID NO: 12841 - DNA, 25 bp, Homo sapiens
ggaagttggaatccagcgcccttga

SEQ ID NO: 12842 - DNA, 25 bp, Homo sapiens
gaagttggaatccagcgcccttgag

SEQ ID NO: 12843 - DNA, 25 bp, Homo sapiens
aagttggaatccagcgcccttgagc

SEQ ID NO: 12844 - DNA, 25 bp, Homo sapiens
agttggaatccagcgcccttgagca

SEQ ID NO: 12845 - DNA, 25 bp, Homo sapiens
gttggaatccagcgcccttgagcaa

SEQ ID NO: 12846 - DNA, 25 bp, Homo sapiens
ttggaatccagcgcccttgagcaac

SEQ ID NO: 12847 - DNA, 25 bp, Homo sapiens
tggaatccagcgcccttgagcaaca

SEQ ID NO: 12848 - DNA, 25 bp, Homo sapiens
ggaatccagcgcccttgagcaacag

SEQ ID NO: 12849 - DNA, 25 bp, Homo sapiens
gaatccagcgcccttgagcaacaga

SEQ ID NO: 12850 - DNA, 25 bp, Homo sapiens
aatccagcgcccttgagcaacagaa

SEQ ID NO: 12851 - DNA, 25 bp, Homo sapiens
atccagcgcccttgagcaacagaaa

SEQ ID NO: 12852 - DNA, 25 bp, Homo sapiens
tccagcgcccttgagcaacagaaaa

SEQ ID NO: 12853 - DNA, 25 bp, Homo sapiens
ccagcgcccttgagcaacagaaaat

SEQ ID NO: 12854 - DNA, 25 bp, Homo sapiens
cagcgcccttgagcaacagaaaatc

SEQ ID NO: 12855 - DNA, 25 bp, Homo sapiens
agcgcccttgagcaacagaaaatcc

SEQ ID NO: 12856 - DNA, 25 bp, Homo sapiens
gcgcccttgagcaacagaaaatcca

SEQ ID NO: 12857 - DNA, 25 bp, Homo sapiens
cgcccttgagcaacagaaaatccag

SEQ ID NO: 12858 - DNA, 25 bp, Homo sapiens
gcccttgagcaacagaaaatccaga

SEQ ID NO: 12859 - DNA, 25 bp, Homo sapiens
cccttgagcaacagaaaatccagag

SEQ ID NO: 12860 - DNA, 25 bp, Homo sapiens
ccttgagcaacagaaaatccagagc

SEQ ID NO: 12861 - DNA, 25 bp, Homo sapiens
cttgagcaacagaaaatccagagcc

SEQ ID NO: 12862 - DNA, 25 bp, Homo sapiens
ttgagcaacagaaaatccagagcca

SEQ ID NO: 12863 - DNA, 25 bp, Homo sapiens
tgagcaacagaaaatccagagccag

SEQ ID NO: 12864 - DNA, 25 bp, Homo sapiens
gagcaacagaaaatccagagccagc

SEQ ID NO: 12865 - DNA, 25 bp, Homo sapiens
agcaacagaaaatccagagccagca

SEQ ID NO: 12866 - DNA, 25 bp, Homo sapiens
gcaacagaaaatccagagccagcag

SEQ ID NO: 12867 - DNA, 25 bp, Homo sapiens
caacagaaaatccagagccagcagg

SEQ ID NO: 12868 - DNA, 25 bp, Homo sapiens
aacagaaaatccagagccagcagga

SEQ ID NO: 12869 - DNA, 25 bp, Homo sapiens
acagaaaatccagagccagcaggaa

SEQ ID NO: 12870 - DNA, 25 bp, Homo sapiens
cagaaaatccagagccagcaggaaa

SEQ ID NO: 12871 - DNA, 25 bp, Homo sapiens
agaaaatccagagccagcaggaaaa

SEQ ID NO: 12872 - DNA, 25 bp, Homo sapiens
gaaaatccagagccagcaggaaaac

SEQ ID NO: 12873 - DNA, 25 bp, Homo sapiens
aaaatccagagccagcaggaaaaca

SEQ ID NO: 12874 - DNA, 25 bp, Homo sapiens
aaatccagagccagcaggaaaacac

SEQ ID NO: 12875 - DNA, 25 bp, Homo sapiens
aatccagagccagcaggaaaacacc

SEQ ID NO: 12876 - DNA, 25 bp, Homo sapiens
atccagagccagcaggaaaacacca

SEQ ID NO: 12877 - DNA, 25 bp, Homo sapiens
tccagagccagcaggaaaacaccat

SEQ ID NO: 12878 - DNA, 25 bp, Homo sapiens
ccagagccagcaggaaaacaccatc

SEQ ID NO: 12879 - DNA, 25 bp, Homo sapiens
cagagccagcaggaaaacaccatca

SEQ ID NO: 12880 - DNA, 25 bp, Homo sapiens
agagccagcaggaaaacaccatcaa

SEQ ID NO: 12881 - DNA, 25 bp, Homo sapiens
gagccagcaggaaaacaccatcaag

SEQ ID NO: 12882 - DNA, 25 bp, Homo sapiens
agccagcaggaaaacaccatcaagc

SEQ ID NO: 12883 - DNA, 25 bp, Homo sapiens
gccagcaggaaaacaccatcaagca

SEQ ID NO: 12884 - DNA, 25 bp, Homo sapiens
ccagcaggaaaacaccatcaagcag

SEQ ID NO: 12885 - DNA, 25 bp, Homo sapiens
cagcaggaaaacaccatcaagcagc

SEQ ID NO: 12886 - DNA, 25 bp, Homo sapiens
agcaggaaaacaccatcaagcagct

SEQ ID NO: 12887 - DNA, 25 bp, Homo sapiens
gcaggaaaacaccatcaagcagctg

SEQ ID NO: 12888 - DNA, 25 bp, Homo sapiens
caggaaaacaccatcaagcagctgg

SEQ ID NO: 12889 - DNA, 25 bp, Homo sapiens
aggaaaacaccatcaagcagctgga

SEQ ID NO: 12890 - DNA, 25 bp, Homo sapiens
ggaaaacaccatcaagcagctggag

SEQ ID NO: 12891 - DNA, 25 bp, Homo sapiens
gaaaacaccatcaagcagctggagc

SEQ ID NO: 12892 - DNA, 25 bp, Homo sapiens
aaaacaccatcaagcagctggagca

SEQ ID NO: 12893 - DNA, 25 bp, Homo sapiens
aaacaccatcaagcagctggagcag

SEQ ID NO: 12894 - DNA, 25 bp, Homo sapiens
aacaccatcaagcagctggagcagc

SEQ ID NO: 12895 - DNA, 25 bp, Homo sapiens
acaccatcaagcagctggagcagct

SEQ ID NO: 12896 - DNA, 25 bp, Homo sapiens
caccatcaagcagctggagcagctc

SEQ ID NO: 12897 - DNA, 25 bp, Homo sapiens
accatcaagcagctggagcagctcc

SEQ ID NO: 12898 - DNA, 25 bp, Homo sapiens
ccatcaagcagctggagcagctccg

SEQ ID NO: 12899 - DNA, 25 bp, Homo sapiens
catcaagcagctggagcagctccgc

SEQ ID NO: 12900 - DNA, 25 bp, Homo sapiens
atcaagcagctggagcagctccgcc

SEQ ID NO: 12901 - DNA, 25 bp, Homo sapiens
tcaagcagctggagcagctccgcca

SEQ ID NO: 12902 - DNA, 25 bp, Homo sapiens
caagcagctggagcagctccgccag

SEQ ID NO: 12903 - DNA, 25 bp, Homo sapiens
aagcagctggagcagctccgccagc

SEQ ID NO: 12904 - DNA, 25 bp, Homo sapiens
agcagctggagcagctccgccagcg

SEQ ID NO: 12905 - DNA, 25 bp, Homo sapiens
gcagctggagcagctccgccagcgg

SEQ ID NO: 12906 - DNA, 25 bp, Homo sapiens
cagctggagcagctccgccagcggt

SEQ ID NO: 12907 - DNA, 25 bp, Homo sapiens
agctggagcagctccgccagcggtt

SEQ ID NO: 12908 - DNA, 25 bp, Homo sapiens
gctggagcagctccgccagcggttt

SEQ ID NO: 12909 - DNA, 25 bp, Homo sapiens
ctggagcagctccgccagcggtttg

SEQ ID NO: 12910 - DNA, 25 bp, Homo sapiens
tggagcagctccgccagcggtttga

SEQ ID NO: 12911 - DNA, 25 bp, Homo sapiens
ggagcagctccgccagcggtttgag

SEQ ID NO: 12912 - DNA, 25 bp, Homo sapiens
gagcagctccgccagcggtttgagc

SEQ ID NO: 12913 - DNA, 25 bp, Homo sapiens
agcagctccgccagcggtttgagct

SEQ ID NO: 12914 - DNA, 25 bp, Homo sapiens
gcagctccgccagcggtttgagctg

SEQ ID NO: 12915 - DNA, 25 bp, Homo sapiens
cagctccgccagcggtttgagctgg

SEQ ID NO: 12916 - DNA, 25 bp, Homo sapiens
agctccgccagcggtttgagctgga

SEQ ID NO: 12917 - DNA, 25 bp, Homo sapiens
gctccgccagcggtttgagctggag

SEQ ID NO: 12918 - DNA, 25 bp, Homo sapiens
ctccgccagcggtttgagctggaga

SEQ ID NO: 12919 - DNA, 25 bp, Homo sapiens
tccgccagcggtttgagctggagat

SEQ ID NO: 12920 - DNA, 25 bp, Homo sapiens
ccgccagcggtttgagctggagatc

SEQ ID NO: 12921 - DNA, 25 bp, Homo sapiens
cgccagcggtttgagctggagatcg

SEQ ID NO: 12922 - DNA, 25 bp, Homo sapiens
gccagcggtttgagctggagatcga

SEQ ID NO: 12923 - DNA, 25 bp, Homo sapiens
ccagcggtttgagctggagatcgag

SEQ ID NO: 12924 - DNA, 25 bp, Homo sapiens
cagcggtttgagctggagatcgagc

SEQ ID NO: 12925 - DNA, 25 bp, Homo sapiens
agcggtttgagctggagatcgagcg

SEQ ID NO: 12926 - DNA, 25 bp, Homo sapiens
gcggtttgagctggagatcgagcgg

SEQ ID NO: 12927 - DNA, 25 bp, Homo sapiens
cggtttgagctggagatcgagcgga

SEQ ID NO: 12928 - DNA, 25 bp, Homo sapiens
ggtttgagctggagatcgagcggat

SEQ ID NO: 12929 - DNA, 25 bp, Homo sapiens
gtttgagctggagatcgagcggatg

SEQ ID NO: 12930 - DNA, 25 bp, Homo sapiens
tttgagctggagatcgagcggatga

SEQ ID NO: 12931 - DNA, 25 bp, Homo sapiens
ttgagctggagatcgagcggatgaa

SEQ ID NO: 12932 - DNA, 25 bp, Homo sapiens
tgagctggagatcgagcggatgaag

SEQ ID NO: 12933 - DNA, 25 bp, Homo sapiens
gagctggagatcgagcggatgaagc

SEQ ID NO: 12934 - DNA, 25 bp, Homo sapiens
agctggagatcgagcggatgaagca

SEQ ID NO: 12935 - DNA, 25 bp, Homo sapiens
gctggagatcgagcggatgaagcag

SEQ ID NO: 12936 - DNA, 25 bp, Homo sapiens
ctggagatcgagcggatgaagcaga

SEQ ID NO: 12937 - DNA, 25 bp, Homo sapiens
tggagatcgagcggatgaagcagat

SEQ ID NO: 12938 - DNA, 25 bp, Homo sapiens
ggagatcgagcggatgaagcagatg

SEQ ID NO: 12939 - DNA, 25 bp, Homo sapiens
gagatcgagcggatgaagcagatgc

SEQ ID NO: 12940 - DNA, 25 bp, Homo sapiens
agatcgagcggatgaagcagatgca

SEQ ID NO: 12941 - DNA, 25 bp, Homo sapiens
gatcgagcggatgaagcagatgcac

SEQ ID NO: 12942 - DNA, 25 bp, Homo sapiens
atcgagcggatgaagcagatgcacc

SEQ ID NO: 12943 - DNA, 25 bp, Homo sapiens
tcgagcggatgaagcagatgcacca

SEQ ID NO: 12944 - DNA, 25 bp, Homo sapiens
cgagcggatgaagcagatgcaccag

SEQ ID NO: 12945 - DNA, 25 bp, Homo sapiens
gagcggatgaagcagatgcaccaga

SEQ ID NO: 12946 - DNA, 25 bp, Homo sapiens
agcggatgaagcagatgcaccagaa

SEQ ID NO: 12947 - DNA, 25 bp, Homo sapiens
gcggatgaagcagatgcaccagaag

SEQ ID NO: 12948 - DNA, 25 bp, Homo sapiens
cggatgaagcagatgcaccagaagg

SEQ ID NO: 12949 - DNA, 25 bp, Homo sapiens
ggatgaagcagatgcaccagaagga

SEQ ID NO: 12950 - DNA, 25 bp, Homo sapiens
gatgaagcagatgcaccagaaggac

SEQ ID NO: 12951 - DNA, 25 bp, Homo sapiens
atgaagcagatgcaccagaaggacc

SEQ ID NO: 12952 - DNA, 25 bp, Homo sapiens
tgaagcagatgcaccagaaggaccg

SEQ ID NO: 12953 - DNA, 25 bp, Homo sapiens
gaagcagatgcaccagaaggaccgt

SEQ ID NO: 12954 - DNA, 25 bp, Homo sapiens
aagcagatgcaccagaaggaccgtg

SEQ ID NO: 12955 - DNA, 25 bp, Homo sapiens
agcagatgcaccagaaggaccgtga

SEQ ID NO: 12956 - DNA, 25 bp, Homo sapiens
gcagatgcaccagaaggaccgtgag

SEQ ID NO: 12957 - DNA, 25 bp, Homo sapiens
cagatgcaccagaaggaccgtgagg

SEQ ID NO: 12958 - DNA, 25 bp, Homo sapiens
agatgcaccagaaggaccgtgagga

SEQ ID NO: 12959 - DNA, 25 bp, Homo sapiens
gatgcaccagaaggaccgtgaggac

SEQ ID NO: 12960 - DNA, 25 bp, Homo sapiens
atgcaccagaaggaccgtgaggacc

SEQ ID NO: 12961 - DNA, 25 bp, Homo sapiens
tgcaccagaaggaccgtgaggacca

SEQ ID NO: 12962 - DNA, 25 bp, Homo sapiens
gcaccagaaggaccgtgaggaccag

SEQ ID NO: 12963 - DNA, 25 bp, Homo sapiens
caccagaaggaccgtgaggaccagg

SEQ ID NO: 12964 - DNA, 25 bp, Homo sapiens
accagaaggaccgtgaggaccagga

SEQ ID NO: 12965 - DNA, 25 bp, Homo sapiens
ccagaaggaccgtgaggaccaggag

SEQ ID NO: 12966 - DNA, 25 bp, Homo sapiens
cagaaggaccgtgaggaccaggagg

SEQ ID NO: 12967 - DNA, 25 bp, Homo sapiens
agaaggaccgtgaggaccaggagga

SEQ ID NO: 12968 - DNA, 25 bp, Homo sapiens
gaaggaccgtgaggaccaggaggag

SEQ ID NO: 12969 - DNA, 25 bp, Homo sapiens
aaggaccgtgaggaccaggaggagg

SEQ ID NO: 12970 - DNA, 25 bp, Homo sapiens
aggaccgtgaggaccaggaggagga

SEQ ID NO: 12971 - DNA, 25 bp, Homo sapiens
ggaccgtgaggaccaggaggaggaa

SEQ ID NO: 12972 - DNA, 25 bp, Homo sapiens
gaccgtgaggaccaggaggaggaac

SEQ ID NO: 12973 - DNA, 25 bp, Homo sapiens
accgtgaggaccaggaggaggaact

SEQ ID NO: 12974 - DNA, 25 bp, Homo sapiens
ccgtgaggaccaggaggaggaactg

SEQ ID NO: 12975 - DNA, 25 bp, Homo sapiens
cgtgaggaccaggaggaggaactgg

SEQ ID NO: 12976 - DNA, 25 bp, Homo sapiens
gtgaggaccaggaggaggaactgga

SEQ ID NO: 12977 - DNA, 25 bp, Homo sapiens
tgaggaccaggaggaggaactggag

SEQ ID NO: 12978 - DNA, 25 bp, Homo sapiens
gaggaccaggaggaggaactggagg

SEQ ID NO: 12979 - DNA, 25 bp, Homo sapiens
aggaccaggaggaggaactggagga

SEQ ID NO: 12980 - DNA, 25 bp, Homo sapiens
ggaccaggaggaggaactggaggat

SEQ ID NO: 12981 - DNA, 25 bp, Homo sapiens
gaccaggaggaggaactggaggatg

SEQ ID NO: 12982 - DNA, 25 bp, Homo sapiens
accaggaggaggaactggaggatgt

SEQ ID NO: 12983 - DNA, 25 bp, Homo sapiens
ccaggaggaggaactggaggatgtc

SEQ ID NO: 12984 - DNA, 25 bp, Homo sapiens
caggaggaggaactggaggatgtcc

SEQ ID NO: 12985 - DNA, 25 bp, Homo sapiens
aggaggaggaactggaggatgtccg

SEQ ID NO: 12986 - DNA, 25 bp, Homo sapiens
ggaggaggaactggaggatgtccgt

SEQ ID NO: 12987 - DNA, 25 bp, Homo sapiens
gaggaggaactggaggatgtccgtc

SEQ ID NO: 12988 - DNA, 25 bp, Homo sapiens
aggaggaactggaggatgtccgtca

SEQ ID NO: 12989 - DNA, 25 bp, Homo sapiens
ggaggaactggaggatgtccgtcag

SEQ ID NO: 12990 - DNA, 25 bp, Homo sapiens
gaggaactggaggatgtccgtcagt

SEQ ID NO: 12991 - DNA, 25 bp, Homo sapiens
aggaactggaggatgtccgtcagtc

SEQ ID NO: 12992 - DNA, 25 bp, Homo sapiens
ggaactggaggatgtccgtcagtcc

SEQ ID NO: 12993 - DNA, 25 bp, Homo sapiens
gaactggaggatgtccgtcagtcct

SEQ ID NO: 12994 - DNA, 25 bp, Homo sapiens
aactggaggatgtccgtcagtcctg

SEQ ID NO: 12995 - DNA, 25 bp, Homo sapiens
actggaggatgtccgtcagtcctgc

SEQ ID NO: 12996 - DNA, 25 bp, Homo sapiens
ctggaggatgtccgtcagtcctgcc

SEQ ID NO: 12997 - DNA, 25 bp, Homo sapiens
tggaggatgtccgtcagtcctgcca

SEQ ID NO: 12998 - DNA, 25 bp, Homo sapiens
ggaggatgtccgtcagtcctgccag

SEQ ID NO: 12999 - DNA, 25 bp, Homo sapiens
gaggatgtccgtcagtcctgccaga

SEQ ID NO: 13000 - DNA, 25 bp, Homo sapiens
aggatgtccgtcagtcctgccagaa

SEQ ID NO: 13001 - DNA, 25 bp, Homo sapiens
ggatgtccgtcagtcctgccagaag

SEQ ID NO: 13002 - DNA, 25 bp, Homo sapiens
gatgtccgtcagtcctgccagaagc

SEQ ID NO: 13003 - DNA, 25 bp, Homo sapiens
atgtccgtcagtcctgccagaagcg

SEQ ID NO: 13004 - DNA, 25 bp, Homo sapiens
tgtccgtcagtcctgccagaagcgg

SEQ ID NO: 13005 - DNA, 25 bp, Homo sapiens
gtccgtcagtcctgccagaagcggc

SEQ ID NO: 13006 - DNA, 25 bp, Homo sapiens
tccgtcagtcctgccagaagcggct

SEQ ID NO: 13007 - DNA, 25 bp, Homo sapiens
ccgtcagtcctgccagaagcggctt

SEQ ID NO: 13008 - DNA, 25 bp, Homo sapiens
cgtcagtcctgccagaagcggcttc

SEQ ID NO: 13009 - DNA, 25 bp, Homo sapiens
gtcagtcctgccagaagcggcttca

SEQ ID NO: 13010 - DNA, 25 bp, Homo sapiens
tcagtcctgccagaagcggcttcat

SEQ ID NO: 13011 - DNA, 25 bp, Homo sapiens
cagtcctgccagaagcggcttcatc

SEQ ID NO: 13012 - DNA, 25 bp, Homo sapiens
agtcctgccagaagcggcttcatca

SEQ ID NO: 13013 - DNA, 25 bp, Homo sapiens
gtcctgccagaagcggcttcatcag

SEQ ID NO: 13014 - DNA, 25 bp, Homo sapiens
tcctgccagaagcggcttcatcagc

SEQ ID NO: 13015 - DNA, 25 bp, Homo sapiens
cctgccagaagcggcttcatcagct

SEQ ID NO: 13016 - DNA, 25 bp, Homo sapiens
ctgccagaagcggcttcatcagctg

SEQ ID NO: 13017 - DNA, 25 bp, Homo sapiens
tgccagaagcggcttcatcagctgg

SEQ ID NO: 13018 - DNA, 25 bp, Homo sapiens
gccagaagcggcttcatcagctgga

SEQ ID NO: 13019 - DNA, 25 bp, Homo sapiens
ccagaagcggcttcatcagctggaa

SEQ ID NO: 13020 - DNA, 25 bp, Homo sapiens
cagaagcggcttcatcagctggaaa

SEQ ID NO: 13021 - DNA, 25 bp, Homo sapiens
agaagcggcttcatcagctggaaat

SEQ ID NO: 13022 - DNA, 25 bp, Homo sapiens
gaagcggcttcatcagctggaaatg

SEQ ID NO: 13023 - DNA, 25 bp, Homo sapiens
aagcggcttcatcagctggaaatgc

SEQ ID NO: 13024 - DNA, 25 bp, Homo sapiens
agcggcttcatcagctggaaatgca

SEQ ID NO: 13025 - DNA, 25 bp, Homo sapiens
gcggcttcatcagctggaaatgcag

SEQ ID NO: 13026 - DNA, 25 bp, Homo sapiens
cggcttcatcagctggaaatgcagc

SEQ ID NO: 13027 - DNA, 25 bp, Homo sapiens
ggcttcatcagctggaaatgcagct

SEQ ID NO: 13028 - DNA, 25 bp, Homo sapiens
gcttcatcagctggaaatgcagctg

SEQ ID NO: 13029 - DNA, 25 bp, Homo sapiens
cttcatcagctggaaatgcagctgg

SEQ ID NO: 13030 - DNA, 25 bp, Homo sapiens
ttcatcagctggaaatgcagctgga

SEQ ID NO: 13031 - DNA, 25 bp, Homo sapiens
tcatcagctggaaatgcagctggag

SEQ ID NO: 13032 - DNA, 25 bp, Homo sapiens
catcagctggaaatgcagctggagc

SEQ ID NO: 13033 - DNA, 25 bp, Homo sapiens
atcagctggaaatgcagctggagca

SEQ ID NO: 13034 - DNA, 25 bp, Homo sapiens
tcagctggaaatgcagctggagcaa

SEQ ID NO: 13035 - DNA, 25 bp, Homo sapiens
cagctggaaatgcagctggagcaag

SEQ ID NO: 13036 - DNA, 25 bp, Homo sapiens
agctggaaatgcagctggagcaaga

SEQ ID NO: 13037 - DNA, 25 bp, Homo sapiens
gctggaaatgcagctggagcaagag

SEQ ID NO: 13038 - DNA, 25 bp, Homo sapiens
ctggaaatgcagctggagcaagagt

SEQ ID NO: 13039 - DNA, 25 bp, Homo sapiens
tggaaatgcagctggagcaagagta

SEQ ID NO: 13040 - DNA, 25 bp, Homo sapiens
ggaaatgcagctggagcaagagtat

SEQ ID NO: 13041 - DNA, 25 bp, Homo sapiens
gaaatgcagctggagcaagagtatg

SEQ ID NO: 13042 - DNA, 25 bp, Homo sapiens
aaatgcagctggagcaagagtatga

SEQ ID NO: 13043 - DNA, 25 bp, Homo sapiens
aatgcagctggagcaagagtatgaa

SEQ ID NO: 13044 - DNA, 25 bp, Homo sapiens
atgcagctggagcaagagtatgaag

SEQ ID NO: 13045 - DNA, 25 bp, Homo sapiens
tgcagctggagcaagagtatgaaga

SEQ ID NO: 13046 - DNA, 25 bp, Homo sapiens
gcagctggagcaagagtatgaagag

SEQ ID NO: 13047 - DNA, 25 bp, Homo sapiens
cagctggagcaagagtatgaagaga

SEQ ID NO: 13048 - DNA, 25 bp, Homo sapiens
agctggagcaagagtatgaagagaa

SEQ ID NO: 13049 - DNA, 25 bp, Homo sapiens
gctggagcaagagtatgaagagaag

SEQ ID NO: 13050 - DNA, 25 bp, Homo sapiens
ctggagcaagagtatgaagagaagc

SEQ ID NO: 13051 - DNA, 25 bp, Homo sapiens
tggagcaagagtatgaagagaagca

SEQ ID NO: 13052 - DNA, 25 bp, Homo sapiens
ggagcaagagtatgaagagaagcag

SEQ ID NO: 13053 - DNA, 25 bp, Homo sapiens
gagcaagagtatgaagagaagcaga

SEQ ID NO: 13054 - DNA, 25 bp, Homo sapiens
agcaagagtatgaagagaagcagat

SEQ ID NO: 13055 - DNA, 25 bp, Homo sapiens
gcaagagtatgaagagaagcagatg

SEQ ID NO: 13056 - DNA, 25 bp, Homo sapiens
caagagtatgaagagaagcagatgg

SEQ ID NO: 13057 - DNA, 25 bp, Homo sapiens
aagagtatgaagagaagcagatggt

SEQ ID NO: 13058 - DNA, 25 bp, Homo sapiens
agagtatgaagagaagcagatggtc

SEQ ID NO: 13059 - DNA, 25 bp, Homo sapiens
gagtatgaagagaagcagatggtcc

SEQ ID NO: 13060 - DNA, 25 bp, Homo sapiens
agtatgaagagaagcagatggtcct

SEQ ID NO: 13061 - DNA, 25 bp, Homo sapiens
gtatgaagagaagcagatggtcctc

SEQ ID NO: 13062 - DNA, 25 bp, Homo sapiens
tatgaagagaagcagatggtcctcc

SEQ ID NO: 13063 - DNA, 25 bp, Homo sapiens
atgaagagaagcagatggtcctcca

SEQ ID NO: 13064 - DNA, 25 bp, Homo sapiens
tgaagagaagcagatggtcctccat

SEQ ID NO: 13065 - DNA, 25 bp, Homo sapiens
gaagagaagcagatggtcctccatg

SEQ ID NO: 13066 - DNA, 25 bp, Homo sapiens
aagagaagcagatggtcctccatga

SEQ ID NO: 13067 - DNA, 25 bp, Homo sapiens
agagaagcagatggtcctccatgag

SEQ ID NO: 13068 - DNA, 25 bp, Homo sapiens
gagaagcagatggtcctccatgaga

SEQ ID NO: 13069 - DNA, 25 bp, Homo sapiens
agaagcagatggtcctccatgagaa

SEQ ID NO: 13070 - DNA, 25 bp, Homo sapiens
gaagcagatggtcctccatgagaag

SEQ ID NO: 13071 - DNA, 25 bp, Homo sapiens
aagcagatggtcctccatgagaagc

SEQ ID NO: 13072 - DNA, 25 bp, Homo sapiens
agcagatggtcctccatgagaagca

SEQ ID NO: 13073 - DNA, 25 bp, Homo sapiens
gcagatggtcctccatgagaagcaa

SEQ ID NO: 13074 - DNA, 25 bp, Homo sapiens
cagatggtcctccatgagaagcaag

SEQ ID NO: 13075 - DNA, 25 bp, Homo sapiens
agatggtcctccatgagaagcaaga

SEQ ID NO: 13076 - DNA, 25 bp, Homo sapiens
gatggtcctccatgagaagcaagat

SEQ ID NO: 13077 - DNA, 25 bp, Homo sapiens
atggtcctccatgagaagcaagatt

SEQ ID NO: 13078 - DNA, 25 bp, Homo sapiens
tggtcctccatgagaagcaagattt

SEQ ID NO: 13079 - DNA, 25 bp, Homo sapiens
ggtcctccatgagaagcaagatttg

SEQ ID NO: 13080 - DNA, 25 bp, Homo sapiens
gtcctccatgagaagcaagatttgg

SEQ ID NO: 13081 - DNA, 25 bp, Homo sapiens
tcctccatgagaagcaagatttgga

SEQ ID NO: 13082 - DNA, 25 bp, Homo sapiens
cctccatgagaagcaagatttggaa

SEQ ID NO: 13083 - DNA, 25 bp, Homo sapiens
ctccatgagaagcaagatttggaag

SEQ ID NO: 13084 - DNA, 25 bp, Homo sapiens
tccatgagaagcaagatttggaagg

SEQ ID NO: 13085 - DNA, 25 bp, Homo sapiens
ccatgagaagcaagatttggaaggc

SEQ ID NO: 13086 - DNA, 25 bp, Homo sapiens
catgagaagcaagatttggaaggct

SEQ ID NO: 13087 - DNA, 25 bp, Homo sapiens
atgagaagcaagatttggaaggctt

SEQ ID NO: 13088 - DNA, 25 bp, Homo sapiens
tgagaagcaagatttggaaggcttg

SEQ ID NO: 13089 - DNA, 25 bp, Homo sapiens
gagaagcaagatttggaaggcttga

SEQ ID NO: 13090 - DNA, 25 bp, Homo sapiens
agaagcaagatttggaaggcttgat

SEQ ID NO: 13091 - DNA, 25 bp, Homo sapiens
gaagcaagatttggaaggcttgatc

SEQ ID NO: 13092 - DNA, 25 bp, Homo sapiens
aagcaagatttggaaggcttgatcg

SEQ ID NO: 13093 - DNA, 25 bp, Homo sapiens
agcaagatttggaaggcttgatcgg

SEQ ID NO: 13094 - DNA, 25 bp, Homo sapiens
gcaagatttggaaggcttgatcgga

SEQ ID NO: 13095 - DNA, 25 bp, Homo sapiens
caagatttggaaggcttgatcggaa

SEQ ID NO: 13096 - DNA, 25 bp, Homo sapiens
aagatttggaaggcttgatcggaac

SEQ ID NO: 13097 - DNA, 25 bp, Homo sapiens
agatttggaaggcttgatcggaacc

SEQ ID NO: 13098 - DNA, 25 bp, Homo sapiens
gatttggaaggcttgatcggaaccc

SEQ ID NO: 13099 - DNA, 25 bp, Homo sapiens
atttggaaggcttgatcggaaccct

SEQ ID NO: 13100 - DNA, 25 bp, Homo sapiens
tttggaaggcttgatcggaaccctc

SEQ ID NO: 13101 - DNA, 25 bp, Homo sapiens
ttggaaggcttgatcggaaccctct

SEQ ID NO: 13102 - DNA, 25 bp, Homo sapiens
tggaaggcttgatcggaaccctctg

SEQ ID NO: 13103 - DNA, 25 bp, Homo sapiens
ggaaggcttgatcggaaccctctgt

SEQ ID NO: 13104 - DNA, 25 bp, Homo sapiens
gaaggcttgatcggaaccctctgtg

SEQ ID NO: 13105 - DNA, 25 bp, Homo sapiens
aaggcttgatcggaaccctctgtga

SEQ ID NO: 13106 - DNA, 25 bp, Homo sapiens
aggcttgatcggaaccctctgtgac

SEQ ID NO: 13107 - DNA, 25 bp, Homo sapiens
ggcttgatcggaaccctctgtgacc

SEQ ID NO: 13108 - DNA, 25 bp, Homo sapiens
gcttgatcggaaccctctgtgacca

SEQ ID NO: 13109 - DNA, 25 bp, Homo sapiens
cttgatcggaaccctctgtgaccag

SEQ ID NO: 13110 - DNA, 25 bp, Homo sapiens
ttgatcggaaccctctgtgaccaga

SEQ ID NO: 13111 - DNA, 25 bp, Homo sapiens
tgatcggaaccctctgtgaccagat

SEQ ID NO: 13112 - DNA, 25 bp, Homo sapiens
gatcggaaccctctgtgaccagatt

SEQ ID NO: 13113 - DNA, 25 bp, Homo sapiens
atcggaaccctctgtgaccagattg

SEQ ID NO: 13114 - DNA, 25 bp, Homo sapiens
tcggaaccctctgtgaccagattgg

SEQ ID NO: 13115 - DNA, 25 bp, Homo sapiens
cggaaccctctgtgaccagattggc

SEQ ID NO: 13116 - DNA, 25 bp, Homo sapiens
ggaaccctctgtgaccagattggcc

SEQ ID NO: 13117 - DNA, 25 bp, Homo sapiens
gaaccctctgtgaccagattggcca

SEQ ID NO: 13118 - DNA, 25 bp, Homo sapiens
aaccctctgtgaccagattggccat

SEQ ID NO: 13119 - DNA, 25 bp, Homo sapiens
accctctgtgaccagattggccatc

SEQ ID NO: 13120 - DNA, 25 bp, Homo sapiens
ccctctgtgaccagattggccatcg

SEQ ID NO: 13121 - DNA, 25 bp, Homo sapiens
cctctgtgaccagattggccatcgg

SEQ ID NO: 13122 - DNA, 25 bp, Homo sapiens
ctctgtgaccagattggccatcggg

SEQ ID NO: 13123 - DNA, 25 bp, Homo sapiens
tctgtgaccagattggccatcggga

SEQ ID NO: 13124 - DNA, 25 bp, Homo sapiens
ctgtgaccagattggccatcgggac

SEQ ID NO: 13125 - DNA, 25 bp, Homo sapiens
tgtgaccagattggccatcgggact

SEQ ID NO: 13126 - DNA, 25 bp, Homo sapiens
gtgaccagattggccatcgggactt

SEQ ID NO: 13127 - DNA, 25 bp, Homo sapiens
tgaccagattggccatcgggacttt

SEQ ID NO: 13128 - DNA, 25 bp, Homo sapiens
gaccagattggccatcgggactttg

SEQ ID NO: 13129 - DNA, 25 bp, Homo sapiens
accagattggccatcgggactttga

SEQ ID NO: 13130 - DNA, 25 bp, Homo sapiens
ccagattggccatcgggactttgat

SEQ ID NO: 13131 - DNA, 25 bp, Homo sapiens
cagattggccatcgggactttgatg

SEQ ID NO: 13132 - DNA, 25 bp, Homo sapiens
agattggccatcgggactttgatgt

SEQ ID NO: 13133 - DNA, 25 bp, Homo sapiens
gattggccatcgggactttgatgtg

SEQ ID NO: 13134 - DNA, 25 bp, Homo sapiens
attggccatcgggactttgatgtgg

SEQ ID NO: 13135 - DNA, 25 bp, Homo sapiens
ttggccatcgggactttgatgtgga

SEQ ID NO: 13136 - DNA, 25 bp, Homo sapiens
tggccatcgggactttgatgtggag

SEQ ID NO: 13137 - DNA, 25 bp, Homo sapiens
ggccatcgggactttgatgtggaga

SEQ ID NO: 13138 - DNA, 25 bp, Homo sapiens
gccatcgggactttgatgtggagaa

SEQ ID NO: 13139 - DNA, 25 bp, Homo sapiens
ccatcgggactttgatgtggagaag

SEQ ID NO: 13140 - DNA, 25 bp, Homo sapiens
catcgggactttgatgtggagaagc

SEQ ID NO: 13141 - DNA, 25 bp, Homo sapiens
atcgggactttgatgtggagaagcg

SEQ ID NO: 13142 - DNA, 25 bp, Homo sapiens
tcgggactttgatgtggagaagcga

SEQ ID NO: 13143 - DNA, 25 bp, Homo sapiens
cgggactttgatgtggagaagcgac

SEQ ID NO: 13144 - DNA, 25 bp, Homo sapiens
gggactttgatgtggagaagcgact

SEQ ID NO: 13145 - DNA, 25 bp, Homo sapiens
ggactttgatgtggagaagcgactt

SEQ ID NO: 13146 - DNA, 25 bp, Homo sapiens
gactttgatgtggagaagcgacttc

SEQ ID NO: 13147 - DNA, 25 bp, Homo sapiens
actttgatgtggagaagcgacttcg

SEQ ID NO: 13148 - DNA, 25 bp, Homo sapiens
ctttgatgtggagaagcgacttcgg

SEQ ID NO: 13149 - DNA, 25 bp, Homo sapiens
tttgatgtggagaagcgacttcgga

SEQ ID NO: 13150 - DNA, 25 bp, Homo sapiens
ttgatgtggagaagcgacttcggag

SEQ ID NO: 13151 - DNA, 25 bp, Homo sapiens
tgatgtggagaagcgacttcggaga

SEQ ID NO: 13152 - DNA, 25 bp, Homo sapiens
gatgtggagaagcgacttcggagag

SEQ ID NO: 13153 - DNA, 25 bp, Homo sapiens
atgtggagaagcgacttcggagaga

SEQ ID NO: 13154 - DNA, 25 bp, Homo sapiens
tgtggagaagcgacttcggagagac

SEQ ID NO: 13155 - DNA, 25 bp, Homo sapiens
gtggagaagcgacttcggagagacc

SEQ ID NO: 13156 - DNA, 25 bp, Homo sapiens
tggagaagcgacttcggagagacct

SEQ ID NO: 13157 - DNA, 25 bp, Homo sapiens
ggagaagcgacttcggagagacctc

SEQ ID NO: 13158 - DNA, 25 bp, Homo sapiens
gagaagcgacttcggagagacctca

SEQ ID NO: 13159 - DNA, 25 bp, Homo sapiens
agaagcgacttcggagagacctcag

SEQ ID NO: 13160 - DNA, 25 bp, Homo sapiens
gaagcgacttcggagagacctcagg

SEQ ID NO: 13161 - DNA, 25 bp, Homo sapiens
aagcgacttcggagagacctcagga

SEQ ID NO: 13162 - DNA, 25 bp, Homo sapiens
agcgacttcggagagacctcaggag

SEQ ID NO: 13163 - DNA, 25 bp, Homo sapiens
gcgacttcggagagacctcaggagg

SEQ ID NO: 13164 - DNA, 25 bp, Homo sapiens
cgacttcggagagacctcaggagga

SEQ ID NO: 13165 - DNA, 25 bp, Homo sapiens
gacttcggagagacctcaggaggac

SEQ ID NO: 13166 - DNA, 25 bp, Homo sapiens
acttcggagagacctcaggaggaca

SEQ ID NO: 13167 - DNA, 25 bp, Homo sapiens
cttcggagagacctcaggaggacac

SEQ ID NO: 13168 - DNA, 25 bp, Homo sapiens
ttcggagagacctcaggaggacaca

SEQ ID NO: 13169 - DNA, 25 bp, Homo sapiens
tcggagagacctcaggaggacacat

SEQ ID NO: 13170 - DNA, 25 bp, Homo sapiens
cggagagacctcaggaggacacatg

SEQ ID NO: 13171 - DNA, 25 bp, Homo sapiens
ggagagacctcaggaggacacatgc

SEQ ID NO: 13172 - DNA, 25 bp, Homo sapiens
gagagacctcaggaggacacatgca

SEQ ID NO: 13173 - DNA, 25 bp, Homo sapiens
agagacctcaggaggacacatgcac

SEQ ID NO: 13174 - DNA, 25 bp, Homo sapiens
gagacctcaggaggacacatgcact

SEQ ID NO: 13175 - DNA, 25 bp, Homo sapiens
agacctcaggaggacacatgcactg

SEQ ID NO: 13176 - DNA, 25 bp, Homo sapiens
gacctcaggaggacacatgcactgt

SEQ ID NO: 13177 - DNA, 25 bp, Homo sapiens
acctcaggaggacacatgcactgtt

SEQ ID NO: 13178 - DNA, 25 bp, Homo sapiens
cctcaggaggacacatgcactgttg

SEQ ID NO: 13179 - DNA, 25 bp, Homo sapiens
ctcaggaggacacatgcactgttgt

SEQ ID NO: 13180 - DNA, 25 bp, Homo sapiens
tcaggaggacacatgcactgttgtc

SEQ ID NO: 13181 - DNA, 25 bp, Homo sapiens
caggaggacacatgcactgttgtca

SEQ ID NO: 13182 - DNA, 25 bp, Homo sapiens
aggaggacacatgcactgttgtcag

SEQ ID NO: 13183 - DNA, 25 bp, Homo sapiens
ggaggacacatgcactgttgtcaga

SEQ ID NO: 13184 - DNA, 25 bp, Homo sapiens
gaggacacatgcactgttgtcagac

SEQ ID NO: 13185 - DNA, 25 bp, Homo sapiens
aggacacatgcactgttgtcagacg

SEQ ID NO: 13186 - DNA, 25 bp, Homo sapiens
ggacacatgcactgttgtcagacgt

SEQ ID NO: 13187 - DNA, 25 bp, Homo sapiens
gacacatgcactgttgtcagacgtg

SEQ ID NO: 13188 - DNA, 25 bp, Homo sapiens
acacatgcactgttgtcagacgtgc

SEQ ID NO: 13189 - DNA, 25 bp, Homo sapiens
cacatgcactgttgtcagacgtgca

SEQ ID NO: 13190 - DNA, 25 bp, Homo sapiens
acatgcactgttgtcagacgtgcag

SEQ ID NO: 13191 - DNA, 25 bp, Homo sapiens
catgcactgttgtcagacgtgcagc

SEQ ID NO: 13192 - DNA, 25 bp, Homo sapiens
atgcactgttgtcagacgtgcagct

SEQ ID NO: 13193 - DNA, 25 bp, Homo sapiens
tgcactgttgtcagacgtgcagctc

SEQ ID NO: 13194 - DNA, 25 bp, Homo sapiens
gcactgttgtcagacgtgcagctcc

SEQ ID NO: 13195 - DNA, 25 bp, Homo sapiens
cactgttgtcagacgtgcagctcct

SEQ ID NO: 13196 - DNA, 25 bp, Homo sapiens
actgttgtcagacgtgcagctcctt

SEQ ID NO: 13197 - DNA, 25 bp, Homo sapiens
ctgttgtcagacgtgcagctccttc

SEQ ID NO: 13198 - DNA, 25 bp, Homo sapiens
tgttgtcagacgtgcagctccttct

SEQ ID NO: 13199 - DNA, 25 bp, Homo sapiens
gttgtcagacgtgcagctccttctg

SEQ ID NO: 13200 - DNA, 25 bp, Homo sapiens
ttgtcagacgtgcagctccttctgg

SEQ ID NO: 13201 - DNA, 25 bp, Homo sapiens
tgtcagacgtgcagctccttctggg

SEQ ID NO: 13202 - DNA, 25 bp, Homo sapiens
gtcagacgtgcagctccttctgggc

SEQ ID NO: 13203 - DNA, 25 bp, Homo sapiens
tcagacgtgcagctccttctgggca

SEQ ID NO: 13204 - DNA, 25 bp, Homo sapiens
cagacgtgcagctccttctgggcac

SEQ ID NO: 13205 - DNA, 25 bp, Homo sapiens
agacgtgcagctccttctgggcacc

SEQ ID NO: 13206 - DNA, 25 bp, Homo sapiens
gacgtgcagctccttctgggcacca

SEQ ID NO: 13207 - DNA, 25 bp, Homo sapiens
acgtgcagctccttctgggcaccat

SEQ ID NO: 13208 - DNA, 25 bp, Homo sapiens
cgtgcagctccttctgggcaccatg

SEQ ID NO: 13209 - DNA, 25 bp, Homo sapiens
gtgcagctccttctgggcaccatgg

SEQ ID NO: 13210 - DNA, 25 bp, Homo sapiens
tgcagctccttctgggcaccatgga

SEQ ID NO: 13211 - DNA, 25 bp, Homo sapiens
gcagctccttctgggcaccatggag

SEQ ID NO: 13212 - DNA, 25 bp, Homo sapiens
cagctccttctgggcaccatggagg

SEQ ID NO: 13213 - DNA, 25 bp, Homo sapiens
agctccttctgggcaccatggagga

SEQ ID NO: 13214 - DNA, 25 bp, Homo sapiens
gctccttctgggcaccatggaggat

SEQ ID NO: 13215 - DNA, 25 bp, Homo sapiens
ctccttctgggcaccatggaggatg

SEQ ID NO: 13216 - DNA, 25 bp, Homo sapiens
tccttctgggcaccatggaggatgg

SEQ ID NO: 13217 - DNA, 25 bp, Homo sapiens
ccttctgggcaccatggaggatggc

SEQ ID NO: 13218 - DNA, 25 bp, Homo sapiens
cttctgggcaccatggaggatggca

SEQ ID NO: 13219 - DNA, 25 bp, Homo sapiens
ttctgggcaccatggaggatggcaa

SEQ ID NO: 13220 - DNA, 25 bp, Homo sapiens
tctgggcaccatggaggatggcaag

SEQ ID NO: 13221 - DNA, 25 bp, Homo sapiens
ctgggcaccatggaggatggcaaga

SEQ ID NO: 13222 - DNA, 25 bp, Homo sapiens
tgggcaccatggaggatggcaagac

SEQ ID NO: 13223 - DNA, 25 bp, Homo sapiens
gggcaccatggaggatggcaagaca

SEQ ID NO: 13224 - DNA, 25 bp, Homo sapiens
ggcaccatggaggatggcaagacat

SEQ ID NO: 13225 - DNA, 25 bp, Homo sapiens
gcaccatggaggatggcaagacatc

SEQ ID NO: 13226 - DNA, 25 bp, Homo sapiens
caccatggaggatggcaagacatca

SEQ ID NO: 13227 - DNA, 25 bp, Homo sapiens
accatggaggatggcaagacatcag

SEQ ID NO: 13228 - DNA, 25 bp, Homo sapiens
ccatggaggatggcaagacatcagt

SEQ ID NO: 13229 - DNA, 25 bp, Homo sapiens
catggaggatggcaagacatcagtc

SEQ ID NO: 13230 - DNA, 25 bp, Homo sapiens
atggaggatggcaagacatcagtca

SEQ ID NO: 13231 - DNA, 25 bp, Homo sapiens
tggaggatggcaagacatcagtcag

SEQ ID NO: 13232 - DNA, 25 bp, Homo sapiens
ggaggatggcaagacatcagtcagc

SEQ ID NO: 13233 - DNA, 25 bp, Homo sapiens
gaggatggcaagacatcagtcagca

SEQ ID NO: 13234 - DNA, 25 bp, Homo sapiens
aggatggcaagacatcagtcagcaa

SEQ ID NO: 13235 - DNA, 25 bp, Homo sapiens
ggatggcaagacatcagtcagcaag

SEQ ID NO: 13236 - DNA, 25 bp, Homo sapiens
gatggcaagacatcagtcagcaagg

SEQ ID NO: 13237 - DNA, 25 bp, Homo sapiens
atggcaagacatcagtcagcaagga

SEQ ID NO: 13238 - DNA, 25 bp, Homo sapiens
tggcaagacatcagtcagcaaggag

SEQ ID NO: 13239 - DNA, 25 bp, Homo sapiens
ggcaagacatcagtcagcaaggagg

SEQ ID NO: 13240 - DNA, 25 bp, Homo sapiens
gcaagacatcagtcagcaaggagga

SEQ ID NO: 13241 - DNA, 25 bp, Homo sapiens
caagacatcagtcagcaaggaggag

SEQ ID NO: 13242 - DNA, 25 bp, Homo sapiens
aagacatcagtcagcaaggaggagc

SEQ ID NO: 13243 - DNA, 25 bp, Homo sapiens
agacatcagtcagcaaggaggagct

SEQ ID NO: 13244 - DNA, 25 bp, Homo sapiens
gacatcagtcagcaaggaggagctg

SEQ ID NO: 13245 - DNA, 25 bp, Homo sapiens
acatcagtcagcaaggaggagctgg

SEQ ID NO: 13246 - DNA, 25 bp, Homo sapiens
catcagtcagcaaggaggagctgga

SEQ ID NO: 13247 - DNA, 25 bp, Homo sapiens
atcagtcagcaaggaggagctggag

SEQ ID NO: 13248 - DNA, 25 bp, Homo sapiens
tcagtcagcaaggaggagctggaga

SEQ ID NO: 13249 - DNA, 25 bp, Homo sapiens
cagtcagcaaggaggagctggagaa

SEQ ID NO: 13250 - DNA, 25 bp, Homo sapiens
agtcagcaaggaggagctggagaaa

SEQ ID NO: 13251 - DNA, 25 bp, Homo sapiens
gtcagcaaggaggagctggagaaag

SEQ ID NO: 13252 - DNA, 25 bp, Homo sapiens
tcagcaaggaggagctggagaaagt

SEQ ID NO: 13253 - DNA, 25 bp, Homo sapiens
cagcaaggaggagctggagaaagtg

SEQ ID NO: 13254 - DNA, 25 bp, Homo sapiens
agcaaggaggagctggagaaagtgc

SEQ ID NO: 13255 - DNA, 25 bp, Homo sapiens
gcaaggaggagctggagaaagtgca

SEQ ID NO: 13256 - DNA, 25 bp, Homo sapiens
caaggaggagctggagaaagtgcac

SEQ ID NO: 13257 - DNA, 25 bp, Homo sapiens
aaggaggagctggagaaagtgcaca

SEQ ID NO: 13258 - DNA, 25 bp, Homo sapiens
aggaggagctggagaaagtgcacag

SEQ ID NO: 13259 - DNA, 25 bp, Homo sapiens
ggaggagctggagaaagtgcacagc

SEQ ID NO: 13260 - DNA, 25 bp, Homo sapiens
gaggagctggagaaagtgcacagcc

SEQ ID NO: 13261 - DNA, 25 bp, Homo sapiens
aggagctggagaaagtgcacagcca

SEQ ID NO: 13262 - DNA, 25 bp, Homo sapiens
ggagctggagaaagtgcacagccag

SEQ ID NO: 13263 - DNA, 25 bp, Homo sapiens
gagctggagaaagtgcacagccagc

SEQ ID NO: 13264 - DNA, 25 bp, Homo sapiens
agctggagaaagtgcacagccagct

SEQ ID NO: 13265 - DNA, 25 bp, Homo sapiens
gctggagaaagtgcacagccagctg

SEQ ID NO: 13266 - DNA, 25 bp, Homo sapiens
ctggagaaagtgcacagccagctgg

SEQ ID NO: 13267 - DNA, 25 bp, Homo sapiens
tggagaaagtgcacagccagctgga

SEQ ID NO: 13268 - DNA, 25 bp, Homo sapiens
ggagaaagtgcacagccagctggag

SEQ ID NO: 13269 - DNA, 25 bp, Homo sapiens
gagaaagtgcacagccagctggagc

SEQ ID NO: 13270 - DNA, 25 bp, Homo sapiens
agaaagtgcacagccagctggagca

SEQ ID NO: 13271 - DNA, 25 bp, Homo sapiens
gaaagtgcacagccagctggagcag

SEQ ID NO: 13272 - DNA, 25 bp, Homo sapiens
aaagtgcacagccagctggagcaga

SEQ ID NO: 13273 - DNA, 25 bp, Homo sapiens
aagtgcacagccagctggagcagag

SEQ ID NO: 13274 - DNA, 25 bp, Homo sapiens
agtgcacagccagctggagcagagt

SEQ ID NO: 13275 - DNA, 25 bp, Homo sapiens
gtgcacagccagctggagcagagtg

SEQ ID NO: 13276 - DNA, 25 bp, Homo sapiens
tgcacagccagctggagcagagtga

SEQ ID NO: 13277 - DNA, 25 bp, Homo sapiens
gcacagccagctggagcagagtgaa

SEQ ID NO: 13278 - DNA, 25 bp, Homo sapiens
cacagccagctggagcagagtgaag

SEQ ID NO: 13279 - DNA, 25 bp, Homo sapiens
acagccagctggagcagagtgaagc

SEQ ID NO: 13280 - DNA, 25 bp, Homo sapiens
cagccagctggagcagagtgaagcc

SEQ ID NO: 13281 - DNA, 25 bp, Homo sapiens
agccagctggagcagagtgaagcca

SEQ ID NO: 13282 - DNA, 25 bp, Homo sapiens
gccagctggagcagagtgaagccaa

SEQ ID NO: 13283 - DNA, 25 bp, Homo sapiens
ccagctggagcagagtgaagccaag

SEQ ID NO: 13284 - DNA, 25 bp, Homo sapiens
cagctggagcagagtgaagccaagt

SEQ ID NO: 13285 - DNA, 25 bp, Homo sapiens
agctggagcagagtgaagccaagtg

SEQ ID NO: 13286 - DNA, 25 bp, Homo sapiens
gctggagcagagtgaagccaagtgt

SEQ ID NO: 13287 - DNA, 25 bp, Homo sapiens
ctggagcagagtgaagccaagtgtg

SEQ ID NO: 13288 - DNA, 25 bp, Homo sapiens
tggagcagagtgaagccaagtgtga

SEQ ID NO: 13289 - DNA, 25 bp, Homo sapiens
ggagcagagtgaagccaagtgtgag

SEQ ID NO: 13290 - DNA, 25 bp, Homo sapiens
gagcagagtgaagccaagtgtgagg

SEQ ID NO: 13291 - DNA, 25 bp, Homo sapiens
agcagagtgaagccaagtgtgagga

SEQ ID NO: 13292 - DNA, 25 bp, Homo sapiens
gcagagtgaagccaagtgtgaggag

SEQ ID NO: 13293 - DNA, 25 bp, Homo sapiens
cagagtgaagccaagtgtgaggagg

SEQ ID NO: 13294 - DNA, 25 bp, Homo sapiens
agagtgaagccaagtgtgaggaggc

SEQ ID NO: 13295 - DNA, 25 bp, Homo sapiens
gagtgaagccaagtgtgaggaggcc

SEQ ID NO: 13296 - DNA, 25 bp, Homo sapiens
agtgaagccaagtgtgaggaggcct

SEQ ID NO: 13297 - DNA, 25 bp, Homo sapiens
gtgaagccaagtgtgaggaggcctt

SEQ ID NO: 13298 - DNA, 25 bp, Homo sapiens
tgaagccaagtgtgaggaggccttg

SEQ ID NO: 13299 - DNA, 25 bp, Homo sapiens
gaagccaagtgtgaggaggccttga

SEQ ID NO: 13300 - DNA, 25 bp, Homo sapiens
aagccaagtgtgaggaggccttgaa

SEQ ID NO: 13301 - DNA, 25 bp, Homo sapiens
agccaagtgtgaggaggccttgaag

SEQ ID NO: 13302 - DNA, 25 bp, Homo sapiens
gccaagtgtgaggaggccttgaaga

SEQ ID NO: 13303 - DNA, 25 bp, Homo sapiens
ccaagtgtgaggaggccttgaagac

SEQ ID NO: 13304 - DNA, 25 bp, Homo sapiens
caagtgtgaggaggccttgaagacg

SEQ ID NO: 13305 - DNA, 25 bp, Homo sapiens
aagtgtgaggaggccttgaagacgc

SEQ ID NO: 13306 - DNA, 25 bp, Homo sapiens
agtgtgaggaggccttgaagacgca

SEQ ID NO: 13307 - DNA, 25 bp, Homo sapiens
gtgtgaggaggccttgaagacgcag

SEQ ID NO: 13308 - DNA, 25 bp, Homo sapiens
tgtgaggaggccttgaagacgcaga

SEQ ID NO: 13309 - DNA, 25 bp, Homo sapiens
gtgaggaggccttgaagacgcagaa

SEQ ID NO: 13310 - DNA, 25 bp, Homo sapiens
tgaggaggccttgaagacgcagaag

SEQ ID NO: 13311 - DNA, 25 bp, Homo sapiens
gaggaggccttgaagacgcagaagg

SEQ ID NO: 13312 - DNA, 25 bp, Homo sapiens
aggaggccttgaagacgcagaaggt

SEQ ID NO: 13313 - DNA, 25 bp, Homo sapiens
ggaggccttgaagacgcagaaggtg

SEQ ID NO: 13314 - DNA, 25 bp, Homo sapiens
gaggccttgaagacgcagaaggtgc

SEQ ID NO: 13315 - DNA, 25 bp, Homo sapiens
aggccttgaagacgcagaaggtgct

SEQ ID NO: 13316 - DNA, 25 bp, Homo sapiens
ggccttgaagacgcagaaggtgctc

SEQ ID NO: 13317 - DNA, 25 bp, Homo sapiens
gccttgaagacgcagaaggtgctca

SEQ ID NO: 13318 - DNA, 25 bp, Homo sapiens
ccttgaagacgcagaaggtgctcac

SEQ ID NO: 13319 - DNA, 25 bp, Homo sapiens
cttgaagacgcagaaggtgctcaca

SEQ ID NO: 13320 - DNA, 25 bp, Homo sapiens
ttgaagacgcagaaggtgctcacag

SEQ ID NO: 13321 - DNA, 25 bp, Homo sapiens
tgaagacgcagaaggtgctcacagc

SEQ ID NO: 13322 - DNA, 25 bp, Homo sapiens
gaagacgcagaaggtgctcacagcg

SEQ ID NO: 13323 - DNA, 25 bp, Homo sapiens
aagacgcagaaggtgctcacagcgg

SEQ ID NO: 13324 - DNA, 25 bp, Homo sapiens
agacgcagaaggtgctcacagcgga

SEQ ID NO: 13325 - DNA, 25 bp, Homo sapiens
gacgcagaaggtgctcacagcggac

SEQ ID NO: 13326 - DNA, 25 bp, Homo sapiens
acgcagaaggtgctcacagcggacc

SEQ ID NO: 13327 - DNA, 25 bp, Homo sapiens
cgcagaaggtgctcacagcggacct

SEQ ID NO: 13328 - DNA, 25 bp, Homo sapiens
gcagaaggtgctcacagcggacctg

SEQ ID NO: 13329 - DNA, 25 bp, Homo sapiens
cagaaggtgctcacagcggacctgg

SEQ ID NO: 13330 - DNA, 25 bp, Homo sapiens
agaaggtgctcacagcggacctgga

SEQ ID NO: 13331 - DNA, 25 bp, Homo sapiens
gaaggtgctcacagcggacctggag

SEQ ID NO: 13332 - DNA, 25 bp, Homo sapiens
aaggtgctcacagcggacctggaga

SEQ ID NO: 13333 - DNA, 25 bp, Homo sapiens
aggtgctcacagcggacctggagag

SEQ ID NO: 13334 - DNA, 25 bp, Homo sapiens
ggtgctcacagcggacctggagagc

SEQ ID NO: 13335 - DNA, 25 bp, Homo sapiens
gtgctcacagcggacctggagagca

SEQ ID NO: 13336 - DNA, 25 bp, Homo sapiens
tgctcacagcggacctggagagcat

SEQ ID NO: 13337 - DNA, 25 bp, Homo sapiens
gctcacagcggacctggagagcatg

SEQ ID NO: 13338 - DNA, 25 bp, Homo sapiens
ctcacagcggacctggagagcatgc

SEQ ID NO: 13339 - DNA, 25 bp, Homo sapiens
tcacagcggacctggagagcatgca

SEQ ID NO: 13340 - DNA, 25 bp, Homo sapiens
cacagcggacctggagagcatgcac

SEQ ID NO: 13341 - DNA, 25 bp, Homo sapiens
acagcggacctggagagcatgcaca

SEQ ID NO: 13342 - DNA, 25 bp, Homo sapiens
cagcggacctggagagcatgcacag

SEQ ID NO: 13343 - DNA, 25 bp, Homo sapiens
agcggacctggagagcatgcacagc

SEQ ID NO: 13344 - DNA, 25 bp, Homo sapiens
gcggacctggagagcatgcacagcg

SEQ ID NO: 13345 - DNA, 25 bp, Homo sapiens
cggacctggagagcatgcacagcga

SEQ ID NO: 13346 - DNA, 25 bp, Homo sapiens
ggacctggagagcatgcacagcgag

SEQ ID NO: 13347 - DNA, 25 bp, Homo sapiens
gacctggagagcatgcacagcgagc

SEQ ID NO: 13348 - DNA, 25 bp, Homo sapiens
acctggagagcatgcacagcgagct

SEQ ID NO: 13349 - DNA, 25 bp, Homo sapiens
cctggagagcatgcacagcgagctg

SEQ ID NO: 13350 - DNA, 25 bp, Homo sapiens
ctggagagcatgcacagcgagctgg

SEQ ID NO: 13351 - DNA, 25 bp, Homo sapiens
tggagagcatgcacagcgagctgga

SEQ ID NO: 13352 - DNA, 25 bp, Homo sapiens
ggagagcatgcacagcgagctggag

SEQ ID NO: 13353 - DNA, 25 bp, Homo sapiens
gagagcatgcacagcgagctggaga

SEQ ID NO: 13354 - DNA, 25 bp, Homo sapiens
agagcatgcacagcgagctggagaa

SEQ ID NO: 13355 - DNA, 25 bp, Homo sapiens
gagcatgcacagcgagctggagaac

SEQ ID NO: 13356 - DNA, 25 bp, Homo sapiens
agcatgcacagcgagctggagaaca

SEQ ID NO: 13357 - DNA, 25 bp, Homo sapiens
gcatgcacagcgagctggagaacat

SEQ ID NO: 13358 - DNA, 25 bp, Homo sapiens
catgcacagcgagctggagaacatg

SEQ ID NO: 13359 - DNA, 25 bp, Homo sapiens
atgcacagcgagctggagaacatga

SEQ ID NO: 13360 - DNA, 25 bp, Homo sapiens
tgcacagcgagctggagaacatgac

SEQ ID NO: 13361 - DNA, 25 bp, Homo sapiens
gcacagcgagctggagaacatgacg

SEQ ID NO: 13362 - DNA, 25 bp, Homo sapiens
cacagcgagctggagaacatgacgc

SEQ ID NO: 13363 - DNA, 25 bp, Homo sapiens
acagcgagctggagaacatgacgcg

SEQ ID NO: 13364 - DNA, 25 bp, Homo sapiens
cagcgagctggagaacatgacgcgg

SEQ ID NO: 13365 - DNA, 25 bp, Homo sapiens
agcgagctggagaacatgacgcgga

SEQ ID NO: 13366 - DNA, 25 bp, Homo sapiens
gcgagctggagaacatgacgcggaa

SEQ ID NO: 13367 - DNA, 25 bp, Homo sapiens
cgagctggagaacatgacgcggaac

SEQ ID NO: 13368 - DNA, 25 bp, Homo sapiens
gagctggagaacatgacgcggaaca

SEQ ID NO: 13369 - DNA, 25 bp, Homo sapiens
agctggagaacatgacgcggaacaa

SEQ ID NO: 13370 - DNA, 25 bp, Homo sapiens
gctggagaacatgacgcggaacaag

SEQ ID NO: 13371 - DNA, 25 bp, Homo sapiens
ctggagaacatgacgcggaacaaga

SEQ ID NO: 13372 - DNA, 25 bp, Homo sapiens
tggagaacatgacgcggaacaagag

SEQ ID NO: 13373 - DNA, 25 bp, Homo sapiens
ggagaacatgacgcggaacaagagc

SEQ ID NO: 13374 - DNA, 25 bp, Homo sapiens
gagaacatgacgcggaacaagagcc

SEQ ID NO: 13375 - DNA, 25 bp, Homo sapiens
agaacatgacgcggaacaagagcct

SEQ ID NO: 13376 - DNA, 25 bp, Homo sapiens
gaacatgacgcggaacaagagcctg

SEQ ID NO: 13377 - DNA, 25 bp, Homo sapiens
aacatgacgcggaacaagagcctgg

SEQ ID NO: 13378 - DNA, 25 bp, Homo sapiens
acatgacgcggaacaagagcctggt

SEQ ID NO: 13379 - DNA, 25 bp, Homo sapiens
catgacgcggaacaagagcctggtg

SEQ ID NO: 13380 - DNA, 25 bp, Homo sapiens
atgacgcggaacaagagcctggtgg

SEQ ID NO: 13381 - DNA, 25 bp, Homo sapiens
tgacgcggaacaagagcctggtgga

SEQ ID NO: 13382 - DNA, 25 bp, Homo sapiens
gacgcggaacaagagcctggtggat

SEQ ID NO: 13383 - DNA, 25 bp, Homo sapiens
acgcggaacaagagcctggtggatg

SEQ ID NO: 13384 - DNA, 25 bp, Homo sapiens
cgcggaacaagagcctggtggatga

SEQ ID NO: 13385 - DNA, 25 bp, Homo sapiens
gcggaacaagagcctggtggatgag

SEQ ID NO: 13386 - DNA, 25 bp, Homo sapiens
cggaacaagagcctggtggatgagc

SEQ ID NO: 13387 - DNA, 25 bp, Homo sapiens
ggaacaagagcctggtggatgagca

SEQ ID NO: 13388 - DNA, 25 bp, Homo sapiens
gaacaagagcctggtggatgagcag

SEQ ID NO: 13389 - DNA, 25 bp, Homo sapiens
aacaagagcctggtggatgagcagc

SEQ ID NO: 13390 - DNA, 25 bp, Homo sapiens
acaagagcctggtggatgagcagct

SEQ ID NO: 13391 - DNA, 25 bp, Homo sapiens
caagagcctggtggatgagcagctg

SEQ ID NO: 13392 - DNA, 25 bp, Homo sapiens
aagagcctggtggatgagcagctgt

SEQ ID NO: 13393 - DNA, 25 bp, Homo sapiens
agagcctggtggatgagcagctgta

SEQ ID NO: 13394 - DNA, 25 bp, Homo sapiens
gagcctggtggatgagcagctgtac

SEQ ID NO: 13395 - DNA, 25 bp, Homo sapiens
agcctggtggatgagcagctgtaca

SEQ ID NO: 13396 - DNA, 25 bp, Homo sapiens
gcctggtggatgagcagctgtacag

SEQ ID NO: 13397 - DNA, 25 bp, Homo sapiens
cctggtggatgagcagctgtacagg

SEQ ID NO: 13398 - DNA, 25 bp, Homo sapiens
ctggtggatgagcagctgtacaggc

SEQ ID NO: 13399 - DNA, 25 bp, Homo sapiens
tggtggatgagcagctgtacaggct

SEQ ID NO: 13400 - DNA, 25 bp, Homo sapiens
ggtggatgagcagctgtacaggctg

SEQ ID NO: 13401 - DNA, 25 bp, Homo sapiens
gtggatgagcagctgtacaggctgc

SEQ ID NO: 13402 - DNA, 25 bp, Homo sapiens
tggatgagcagctgtacaggctgca

SEQ ID NO: 13403 - DNA, 25 bp, Homo sapiens
ggatgagcagctgtacaggctgcag

SEQ ID NO: 13404 - DNA, 25 bp, Homo sapiens
gatgagcagctgtacaggctgcagt

SEQ ID NO: 13405 - DNA, 25 bp, Homo sapiens
atgagcagctgtacaggctgcagtt

SEQ ID NO: 13406 - DNA, 25 bp, Homo sapiens
tgagcagctgtacaggctgcagttt

SEQ ID NO: 13407 - DNA, 25 bp, Homo sapiens
gagcagctgtacaggctgcagtttg

SEQ ID NO: 13408 - DNA, 25 bp, Homo sapiens
agcagctgtacaggctgcagtttga

SEQ ID NO: 13409 - DNA, 25 bp, Homo sapiens
gcagctgtacaggctgcagtttgag

SEQ ID NO: 13410 - DNA, 25 bp, Homo sapiens
cagctgtacaggctgcagtttgaga

SEQ ID NO: 13411 - DNA, 25 bp, Homo sapiens
agctgtacaggctgcagtttgagaa

SEQ ID NO: 13412 - DNA, 25 bp, Homo sapiens
gctgtacaggctgcagtttgagaag

SEQ ID NO: 13413 - DNA, 25 bp, Homo sapiens
ctgtacaggctgcagtttgagaagg

SEQ ID NO: 13414 - DNA, 25 bp, Homo sapiens
tgtacaggctgcagtttgagaaggc

SEQ ID NO: 13415 - DNA, 25 bp, Homo sapiens
gtacaggctgcagtttgagaaggcg

SEQ ID NO: 13416 - DNA, 25 bp, Homo sapiens
tacaggctgcagtttgagaaggcgg

SEQ ID NO: 13417 - DNA, 25 bp, Homo sapiens
acaggctgcagtttgagaaggcgga

SEQ ID NO: 13418 - DNA, 25 bp, Homo sapiens
caggctgcagtttgagaaggcggac

SEQ ID NO: 13419 - DNA, 25 bp, Homo sapiens
aggctgcagtttgagaaggcggacc

SEQ ID NO: 13420 - DNA, 25 bp, Homo sapiens
ggctgcagtttgagaaggcggacct

SEQ ID NO: 13421 - DNA, 25 bp, Homo sapiens
gctgcagtttgagaaggcggacctc

SEQ ID NO: 13422 - DNA, 25 bp, Homo sapiens
ctgcagtttgagaaggcggacctcc

SEQ ID NO: 13423 - DNA, 25 bp, Homo sapiens
tgcagtttgagaaggcggacctcct

SEQ ID NO: 13424 - DNA, 25 bp, Homo sapiens
gcagtttgagaaggcggacctcctg

SEQ ID NO: 13425 - DNA, 25 bp, Homo sapiens
cagtttgagaaggcggacctcctga

SEQ ID NO: 13426 - DNA, 25 bp, Homo sapiens
agtttgagaaggcggacctcctgaa

SEQ ID NO: 13427 - DNA, 25 bp, Homo sapiens
gtttgagaaggcggacctcctgaag

SEQ ID NO: 13428 - DNA, 25 bp, Homo sapiens
tttgagaaggcggacctcctgaagc

SEQ ID NO: 13429 - DNA, 25 bp, Homo sapiens
ttgagaaggcggacctcctgaagcg

SEQ ID NO: 13430 - DNA, 25 bp, Homo sapiens
tgagaaggcggacctcctgaagcgc

SEQ ID NO: 13431 - DNA, 25 bp, Homo sapiens
gagaaggcggacctcctgaagcgca

SEQ ID NO: 13432 - DNA, 25 bp, Homo sapiens
agaaggcggacctcctgaagcgcat

SEQ ID NO: 13433 - DNA, 25 bp, Homo sapiens
gaaggcggacctcctgaagcgcatc

SEQ ID NO: 13434 - DNA, 25 bp, Homo sapiens
aaggcggacctcctgaagcgcatcg

SEQ ID NO: 13435 - DNA, 25 bp, Homo sapiens
aggcggacctcctgaagcgcatcga

SEQ ID NO: 13436 - DNA, 25 bp, Homo sapiens
ggcggacctcctgaagcgcatcgat

SEQ ID NO: 13437 - DNA, 25 bp, Homo sapiens
gcggacctcctgaagcgcatcgatg

SEQ ID NO: 13438 - DNA, 25 bp, Homo sapiens
cggacctcctgaagcgcatcgatga

SEQ ID NO: 13439 - DNA, 25 bp, Homo sapiens
ggacctcctgaagcgcatcgatgag

SEQ ID NO: 13440 - DNA, 25 bp, Homo sapiens
gacctcctgaagcgcatcgatgagg

SEQ ID NO: 13441 - DNA, 25 bp, Homo sapiens
acctcctgaagcgcatcgatgagga

SEQ ID NO: 13442 - DNA, 25 bp, Homo sapiens
cctcctgaagcgcatcgatgaggac

SEQ ID NO: 13443 - DNA, 25 bp, Homo sapiens
ctcctgaagcgcatcgatgaggacc

SEQ ID NO: 13444 - DNA, 25 bp, Homo sapiens
tcctgaagcgcatcgatgaggacca

SEQ ID NO: 13445 - DNA, 25 bp, Homo sapiens
cctgaagcgcatcgatgaggaccag

SEQ ID NO: 13446 - DNA, 25 bp, Homo sapiens
ctgaagcgcatcgatgaggaccagg

SEQ ID NO: 13447 - DNA, 25 bp, Homo sapiens
tgaagcgcatcgatgaggaccagga

SEQ ID NO: 13448 - DNA, 25 bp, Homo sapiens
gaagcgcatcgatgaggaccaggat

SEQ ID NO: 13449 - DNA, 25 bp, Homo sapiens
aagcgcatcgatgaggaccaggatg

SEQ ID NO: 13450 - DNA, 25 bp, Homo sapiens
agcgcatcgatgaggaccaggatga

SEQ ID NO: 13451 - DNA, 25 bp, Homo sapiens
gcgcatcgatgaggaccaggatgac

SEQ ID NO: 13452 - DNA, 25 bp, Homo sapiens
cgcatcgatgaggaccaggatgacc

SEQ ID NO: 13453 - DNA, 25 bp, Homo sapiens
gcatcgatgaggaccaggatgacct

SEQ ID NO: 13454 - DNA, 25 bp, Homo sapiens
catcgatgaggaccaggatgacctg

SEQ ID NO: 13455 - DNA, 25 bp, Homo sapiens
atcgatgaggaccaggatgacctga

SEQ ID NO: 13456 - DNA, 25 bp, Homo sapiens
tcgatgaggaccaggatgacctgaa

SEQ ID NO: 13457 - DNA, 25 bp, Homo sapiens
cgatgaggaccaggatgacctgaat

SEQ ID NO: 13458 - DNA, 25 bp, Homo sapiens
gatgaggaccaggatgacctgaatg

SEQ ID NO: 13459 - DNA, 25 bp, Homo sapiens
atgaggaccaggatgacctgaatga

SEQ ID NO: 13460 - DNA, 25 bp, Homo sapiens
tgaggaccaggatgacctgaatgag

SEQ ID NO: 13461 - DNA, 25 bp, Homo sapiens
gaggaccaggatgacctgaatgagc

SEQ ID NO: 13462 - DNA, 25 bp, Homo sapiens
aggaccaggatgacctgaatgagct

SEQ ID NO: 13463 - DNA, 25 bp, Homo sapiens
ggaccaggatgacctgaatgagctg

SEQ ID NO: 13464 - DNA, 25 bp, Homo sapiens
gaccaggatgacctgaatgagctga

SEQ ID NO: 13465 - DNA, 25 bp, Homo sapiens
accaggatgacctgaatgagctgat

SEQ ID NO: 13466 - DNA, 25 bp, Homo sapiens
ccaggatgacctgaatgagctgatg

SEQ ID NO: 13467 - DNA, 25 bp, Homo sapiens
caggatgacctgaatgagctgatgc

SEQ ID NO: 13468 - DNA, 25 bp, Homo sapiens
aggatgacctgaatgagctgatgca

SEQ ID NO: 13469 - DNA, 25 bp, Homo sapiens
ggatgacctgaatgagctgatgcag

SEQ ID NO: 13470 - DNA, 25 bp, Homo sapiens
gatgacctgaatgagctgatgcaga

SEQ ID NO: 13471 - DNA, 25 bp, Homo sapiens
atgacctgaatgagctgatgcagaa

SEQ ID NO: 13472 - DNA, 25 bp, Homo sapiens
tgacctgaatgagctgatgcagaag

SEQ ID NO: 13473 - DNA, 25 bp, Homo sapiens
gacctgaatgagctgatgcagaagc

SEQ ID NO: 13474 - DNA, 25 bp, Homo sapiens
acctgaatgagctgatgcagaagca

SEQ ID NO: 13475 - DNA, 25 bp, Homo sapiens
cctgaatgagctgatgcagaagcac

SEQ ID NO: 13476 - DNA, 25 bp, Homo sapiens
ctgaatgagctgatgcagaagcaca

SEQ ID NO: 13477 - DNA, 25 bp, Homo sapiens
tgaatgagctgatgcagaagcacaa

SEQ ID NO: 13478 - DNA, 25 bp, Homo sapiens
gaatgagctgatgcagaagcacaag

SEQ ID NO: 13479 - DNA, 25 bp, Homo sapiens
aatgagctgatgcagaagcacaagg

SEQ ID NO: 13480 - DNA, 25 bp, Homo sapiens
atgagctgatgcagaagcacaagga

SEQ ID NO: 13481 - DNA, 25 bp, Homo sapiens
tgagctgatgcagaagcacaaggac

SEQ ID NO: 13482 - DNA, 25 bp, Homo sapiens
gagctgatgcagaagcacaaggacc

SEQ ID NO: 13483 - DNA, 25 bp, Homo sapiens
agctgatgcagaagcacaaggacct

SEQ ID NO: 13484 - DNA, 25 bp, Homo sapiens
gctgatgcagaagcacaaggacctc

SEQ ID NO: 13485 - DNA, 25 bp, Homo sapiens
ctgatgcagaagcacaaggacctca

SEQ ID NO: 13486 - DNA, 25 bp, Homo sapiens
tgatgcagaagcacaaggacctcat

SEQ ID NO: 13487 - DNA, 25 bp, Homo sapiens
gatgcagaagcacaaggacctcatt

SEQ ID NO: 13488 - DNA, 25 bp, Homo sapiens
atgcagaagcacaaggacctcattg

SEQ ID NO: 13489 - DNA, 25 bp, Homo sapiens
tgcagaagcacaaggacctcattgc

SEQ ID NO: 13490 - DNA, 25 bp, Homo sapiens
gcagaagcacaaggacctcattgct

SEQ ID NO: 13491 - DNA, 25 bp, Homo sapiens
cagaagcacaaggacctcattgctc

SEQ ID NO: 13492 - DNA, 25 bp, Homo sapiens
agaagcacaaggacctcattgctca

SEQ ID NO: 13493 - DNA, 25 bp, Homo sapiens
gaagcacaaggacctcattgctcag

SEQ ID NO: 13494 - DNA, 25 bp, Homo sapiens
aagcacaaggacctcattgctcagt

SEQ ID NO: 13495 - DNA, 25 bp, Homo sapiens
agcacaaggacctcattgctcagtc

SEQ ID NO: 13496 - DNA, 25 bp, Homo sapiens
gcacaaggacctcattgctcagtct

SEQ ID NO: 13497 - DNA, 25 bp, Homo sapiens
cacaaggacctcattgctcagtctg

SEQ ID NO: 13498 - DNA, 25 bp, Homo sapiens
acaaggacctcattgctcagtctgc

SEQ ID NO: 13499 - DNA, 25 bp, Homo sapiens
caaggacctcattgctcagtctgct

SEQ ID NO: 13500 - DNA, 25 bp, Homo sapiens
aaggacctcattgctcagtctgctg

SEQ ID NO: 13501 - DNA, 25 bp, Homo sapiens
aggacctcattgctcagtctgctgc

SEQ ID NO: 13502 - DNA, 25 bp, Homo sapiens
ggacctcattgctcagtctgctgct

SEQ ID NO: 13503 - DNA, 25 bp, Homo sapiens
gacctcattgctcagtctgctgctg

SEQ ID NO: 13504 - DNA, 25 bp, Homo sapiens
acctcattgctcagtctgctgctga

SEQ ID NO: 13505 - DNA, 25 bp, Homo sapiens
cctcattgctcagtctgctgctgac

SEQ ID NO: 13506 - DNA, 25 bp, Homo sapiens
ctcattgctcagtctgctgctgaca

SEQ ID NO: 13507 - DNA, 25 bp, Homo sapiens
tcattgctcagtctgctgctgacat

SEQ ID NO: 13508 - DNA, 25 bp, Homo sapiens
cattgctcagtctgctgctgacatt

SEQ ID NO: 13509 - DNA, 25 bp, Homo sapiens
attgctcagtctgctgctgacattg

SEQ ID NO: 13510 - DNA, 25 bp, Homo sapiens
ttgctcagtctgctgctgacattgg

SEQ ID NO: 13511 - DNA, 25 bp, Homo sapiens
tgctcagtctgctgctgacattggg

SEQ ID NO: 13512 - DNA, 25 bp, Homo sapiens
gctcagtctgctgctgacattgggc

SEQ ID NO: 13513 - DNA, 25 bp, Homo sapiens
ctcagtctgctgctgacattgggca

SEQ ID NO: 13514 - DNA, 25 bp, Homo sapiens
tcagtctgctgctgacattgggcag

SEQ ID NO: 13515 - DNA, 25 bp, Homo sapiens
cagtctgctgctgacattgggcaga

SEQ ID NO: 13516 - DNA, 25 bp, Homo sapiens
agtctgctgctgacattgggcagat

SEQ ID NO: 13517 - DNA, 25 bp, Homo sapiens
gtctgctgctgacattgggcagatc

SEQ ID NO: 13518 - DNA, 25 bp, Homo sapiens
tctgctgctgacattgggcagatcc

SEQ ID NO: 13519 - DNA, 25 bp, Homo sapiens
ctgctgctgacattgggcagatcca

SEQ ID NO: 13520 - DNA, 25 bp, Homo sapiens
tgctgctgacattgggcagatccaa

SEQ ID NO: 13521 - DNA, 25 bp, Homo sapiens
gctgctgacattgggcagatccaag

SEQ ID NO: 13522 - DNA, 25 bp, Homo sapiens
ctgctgacattgggcagatccaaga

SEQ ID NO: 13523 - DNA, 25 bp, Homo sapiens
tgctgacattgggcagatccaagaa

SEQ ID NO: 13524 - DNA, 25 bp, Homo sapiens
gctgacattgggcagatccaagaac

SEQ ID NO: 13525 - DNA, 25 bp, Homo sapiens
ctgacattgggcagatccaagaact

SEQ ID NO: 13526 - DNA, 25 bp, Homo sapiens
tgacattgggcagatccaagaactg

SEQ ID NO: 13527 - DNA, 25 bp, Homo sapiens
gacattgggcagatccaagaactgc

SEQ ID NO: 13528 - DNA, 25 bp, Homo sapiens
acattgggcagatccaagaactgca

SEQ ID NO: 13529 - DNA, 25 bp, Homo sapiens
cattgggcagatccaagaactgcag

SEQ ID NO: 13530 - DNA, 25 bp, Homo sapiens
attgggcagatccaagaactgcagc

SEQ ID NO: 13531 - DNA, 25 bp, Homo sapiens
ttgggcagatccaagaactgcagct

SEQ ID NO: 13532 - DNA, 25 bp, Homo sapiens
tgggcagatccaagaactgcagctg

SEQ ID NO: 13533 - DNA, 25 bp, Homo sapiens
gggcagatccaagaactgcagctgc

SEQ ID NO: 13534 - DNA, 25 bp, Homo sapiens
ggcagatccaagaactgcagctgca

SEQ ID NO: 13535 - DNA, 25 bp, Homo sapiens
gcagatccaagaactgcagctgcag

SEQ ID NO: 13536 - DNA, 25 bp, Homo sapiens
cagatccaagaactgcagctgcagc

SEQ ID NO: 13537 - DNA, 25 bp, Homo sapiens
agatccaagaactgcagctgcagct

SEQ ID NO: 13538 - DNA, 25 bp, Homo sapiens
gatccaagaactgcagctgcagctg

SEQ ID NO: 13539 - DNA, 25 bp, Homo sapiens
atccaagaactgcagctgcagctgg

SEQ ID NO: 13540 - DNA, 25 bp, Homo sapiens
tccaagaactgcagctgcagctgga

SEQ ID NO: 13541 - DNA, 25 bp, Homo sapiens
ccaagaactgcagctgcagctggag

SEQ ID NO: 13542 - DNA, 25 bp, Homo sapiens
caagaactgcagctgcagctggagg

SEQ ID NO: 13543 - DNA, 25 bp, Homo sapiens
aagaactgcagctgcagctggagga

SEQ ID NO: 13544 - DNA, 25 bp, Homo sapiens
agaactgcagctgcagctggaggaa

SEQ ID NO: 13545 - DNA, 25 bp, Homo sapiens
gaactgcagctgcagctggaggaag

SEQ ID NO: 13546 - DNA, 25 bp, Homo sapiens
aactgcagctgcagctggaggaagc

SEQ ID NO: 13547 - DNA, 25 bp, Homo sapiens
actgcagctgcagctggaggaagcc

SEQ ID NO: 13548 - DNA, 25 bp, Homo sapiens
ctgcagctgcagctggaggaagcca

SEQ ID NO: 13549 - DNA, 25 bp, Homo sapiens
tgcagctgcagctggaggaagccaa

SEQ ID NO: 13550 - DNA, 25 bp, Homo sapiens
gcagctgcagctggaggaagccaag

SEQ ID NO: 13551 - DNA, 25 bp, Homo sapiens
cagctgcagctggaggaagccaaga

SEQ ID NO: 13552 - DNA, 25 bp, Homo sapiens
agctgcagctggaggaagccaagaa

SEQ ID NO: 13553 - DNA, 25 bp, Homo sapiens
gctgcagctggaggaagccaagaag

SEQ ID NO: 13554 - DNA, 25 bp, Homo sapiens
ctgcagctggaggaagccaagaagg

SEQ ID NO: 13555 - DNA, 25 bp, Homo sapiens
tgcagctggaggaagccaagaagga

SEQ ID NO: 13556 - DNA, 25 bp, Homo sapiens
gcagctggaggaagccaagaaggag

SEQ ID NO: 13557 - DNA, 25 bp, Homo sapiens
cagctggaggaagccaagaaggaga

SEQ ID NO: 13558 - DNA, 25 bp, Homo sapiens
agctggaggaagccaagaaggagaa

SEQ ID NO: 13559 - DNA, 25 bp, Homo sapiens
gctggaggaagccaagaaggagaag

SEQ ID NO: 13560 - DNA, 25 bp, Homo sapiens
ctggaggaagccaagaaggagaagc

SEQ ID NO: 13561 - DNA, 25 bp, Homo sapiens
tggaggaagccaagaaggagaagca

SEQ ID NO: 13562 - DNA, 25 bp, Homo sapiens
ggaggaagccaagaaggagaagcac

SEQ ID NO: 13563 - DNA, 25 bp, Homo sapiens
gaggaagccaagaaggagaagcaca

SEQ ID NO: 13564 - DNA, 25 bp, Homo sapiens
aggaagccaagaaggagaagcacaa

SEQ ID NO: 13565 - DNA, 25 bp, Homo sapiens
ggaagccaagaaggagaagcacaag

SEQ ID NO: 13566 - DNA, 25 bp, Homo sapiens
gaagccaagaaggagaagcacaagc

SEQ ID NO: 13567 - DNA, 25 bp, Homo sapiens
aagccaagaaggagaagcacaagct

SEQ ID NO: 13568 - DNA, 25 bp, Homo sapiens
agccaagaaggagaagcacaagcta

SEQ ID NO: 13569 - DNA, 25 bp, Homo sapiens
gccaagaaggagaagcacaagctac

SEQ ID NO: 13570 - DNA, 25 bp, Homo sapiens
ccaagaaggagaagcacaagctaca

SEQ ID NO: 13571 - DNA, 25 bp, Homo sapiens
caagaaggagaagcacaagctacaa

SEQ ID NO: 13572 - DNA, 25 bp, Homo sapiens
aagaaggagaagcacaagctacaag

SEQ ID NO: 13573 - DNA, 25 bp, Homo sapiens
agaaggagaagcacaagctacaaga

SEQ ID NO: 13574 - DNA, 25 bp, Homo sapiens
gaaggagaagcacaagctacaagaa

SEQ ID NO: 13575 - DNA, 25 bp, Homo sapiens
aaggagaagcacaagctacaagaac

SEQ ID NO: 13576 - DNA, 25 bp, Homo sapiens
aggagaagcacaagctacaagaaca

SEQ ID NO: 13577 - DNA, 25 bp, Homo sapiens
ggagaagcacaagctacaagaacaa

SEQ ID NO: 13578 - DNA, 25 bp, Homo sapiens
gagaagcacaagctacaagaacaac

SEQ ID NO: 13579 - DNA, 25 bp, Homo sapiens
agaagcacaagctacaagaacaact

SEQ ID NO: 13580 - DNA, 25 bp, Homo sapiens
gaagcacaagctacaagaacaactg

SEQ ID NO: 13581 - DNA, 25 bp, Homo sapiens
aagcacaagctacaagaacaactgc

SEQ ID NO: 13582 - DNA, 25 bp, Homo sapiens
agcacaagctacaagaacaactgca

SEQ ID NO: 13583 - DNA, 25 bp, Homo sapiens
gcacaagctacaagaacaactgcag

SEQ ID NO: 13584 - DNA, 25 bp, Homo sapiens
cacaagctacaagaacaactgcagg

SEQ ID NO: 13585 - DNA, 25 bp, Homo sapiens
acaagctacaagaacaactgcaggt

SEQ ID NO: 13586 - DNA, 25 bp, Homo sapiens
caagctacaagaacaactgcaggtg

SEQ ID NO: 13587 - DNA, 25 bp, Homo sapiens
aagctacaagaacaactgcaggtgg

SEQ ID NO: 13588 - DNA, 25 bp, Homo sapiens
agctacaagaacaactgcaggtggc

SEQ ID NO: 13589 - DNA, 25 bp, Homo sapiens
gctacaagaacaactgcaggtggct

SEQ ID NO: 13590 - DNA, 25 bp, Homo sapiens
ctacaagaacaactgcaggtggctc

SEQ ID NO: 13591 - DNA, 25 bp, Homo sapiens
tacaagaacaactgcaggtggctca

SEQ ID NO: 13592 - DNA, 25 bp, Homo sapiens
acaagaacaactgcaggtggctcag

SEQ ID NO: 13593 - DNA, 25 bp, Homo sapiens
caagaacaactgcaggtggctcaga

SEQ ID NO: 13594 - DNA, 25 bp, Homo sapiens
aagaacaactgcaggtggctcagat

SEQ ID NO: 13595 - DNA, 25 bp, Homo sapiens
agaacaactgcaggtggctcagatg

SEQ ID NO: 13596 - DNA, 25 bp, Homo sapiens
gaacaactgcaggtggctcagatgc

SEQ ID NO: 13597 - DNA, 25 bp, Homo sapiens
aacaactgcaggtggctcagatgcg

SEQ ID NO: 13598 - DNA, 25 bp, Homo sapiens
acaactgcaggtggctcagatgcgc

SEQ ID NO: 13599 - DNA, 25 bp, Homo sapiens
caactgcaggtggctcagatgcgca

SEQ ID NO: 13600 - DNA, 25 bp, Homo sapiens
aactgcaggtggctcagatgcgcat

SEQ ID NO: 13601 - DNA, 25 bp, Homo sapiens
actgcaggtggctcagatgcgcatc

SEQ ID NO: 13602 - DNA, 25 bp, Homo sapiens
ctgcaggtggctcagatgcgcatcg

SEQ ID NO: 13603 - DNA, 25 bp, Homo sapiens
tgcaggtggctcagatgcgcatcga

SEQ ID NO: 13604 - DNA, 25 bp, Homo sapiens
gcaggtggctcagatgcgcatcgag

SEQ ID NO: 13605 - DNA, 25 bp, Homo sapiens
caggtggctcagatgcgcatcgagt

SEQ ID NO: 13606 - DNA, 25 bp, Homo sapiens
aggtggctcagatgcgcatcgagta

SEQ ID NO: 13607 - DNA, 25 bp, Homo sapiens
ggtggctcagatgcgcatcgagtac

SEQ ID NO: 13608 - DNA, 25 bp, Homo sapiens
gtggctcagatgcgcatcgagtacc

SEQ ID NO: 13609 - DNA, 25 bp, Homo sapiens
tggctcagatgcgcatcgagtacct

SEQ ID NO: 13610 - DNA, 25 bp, Homo sapiens
ggctcagatgcgcatcgagtacctg

SEQ ID NO: 13611 - DNA, 25 bp, Homo sapiens
gctcagatgcgcatcgagtacctgg

SEQ ID NO: 13612 - DNA, 25 bp, Homo sapiens
ctcagatgcgcatcgagtacctgga

SEQ ID NO: 13613 - DNA, 25 bp, Homo sapiens
tcagatgcgcatcgagtacctggaa

SEQ ID NO: 13614 - DNA, 25 bp, Homo sapiens
cagatgcgcatcgagtacctggaac

SEQ ID NO: 13615 - DNA, 25 bp, Homo sapiens
agatgcgcatcgagtacctggaaca

SEQ ID NO: 13616 - DNA, 25 bp, Homo sapiens
gatgcgcatcgagtacctggaacag

SEQ ID NO: 13617 - DNA, 25 bp, Homo sapiens
atgcgcatcgagtacctggaacagt

SEQ ID NO: 13618 - DNA, 25 bp, Homo sapiens
tgcgcatcgagtacctggaacagtc

SEQ ID NO: 13619 - DNA, 25 bp, Homo sapiens
gcgcatcgagtacctggaacagtcc

SEQ ID NO: 13620 - DNA, 25 bp, Homo sapiens
cgcatcgagtacctggaacagtcca

SEQ ID NO: 13621 - DNA, 25 bp, Homo sapiens
gcatcgagtacctggaacagtccac

SEQ ID NO: 13622 - DNA, 25 bp, Homo sapiens
catcgagtacctggaacagtccacc

SEQ ID NO: 13623 - DNA, 25 bp, Homo sapiens
atcgagtacctggaacagtccaccg

SEQ ID NO: 13624 - DNA, 25 bp, Homo sapiens
tcgagtacctggaacagtccaccgt

SEQ ID NO: 13625 - DNA, 25 bp, Homo sapiens
cgagtacctggaacagtccaccgtg

SEQ ID NO: 13626 - DNA, 25 bp, Homo sapiens
gagtacctggaacagtccaccgtgg

SEQ ID NO: 13627 - DNA, 25 bp, Homo sapiens
agtacctggaacagtccaccgtgga

SEQ ID NO: 13628 - DNA, 25 bp, Homo sapiens
gtacctggaacagtccaccgtggat

SEQ ID NO: 13629 - DNA, 25 bp, Homo sapiens
tacctggaacagtccaccgtggatc

SEQ ID NO: 13630 - DNA, 25 bp, Homo sapiens
acctggaacagtccaccgtggatcg

SEQ ID NO: 13631 - DNA, 25 bp, Homo sapiens
cctggaacagtccaccgtggatcga

SEQ ID NO: 13632 - DNA, 25 bp, Homo sapiens
ctggaacagtccaccgtggatcgag

SEQ ID NO: 13633 - DNA, 25 bp, Homo sapiens
tggaacagtccaccgtggatcgagc

SEQ ID NO: 13634 - DNA, 25 bp, Homo sapiens
ggaacagtccaccgtggatcgagcc

SEQ ID NO: 13635 - DNA, 25 bp, Homo sapiens
gaacagtccaccgtggatcgagcca

SEQ ID NO: 13636 - DNA, 25 bp, Homo sapiens
aacagtccaccgtggatcgagccat

SEQ ID NO: 13637 - DNA, 25 bp, Homo sapiens
acagtccaccgtggatcgagccatc

SEQ ID NO: 13638 - DNA, 25 bp, Homo sapiens
cagtccaccgtggatcgagccatcg

SEQ ID NO: 13639 - DNA, 25 bp, Homo sapiens
agtccaccgtggatcgagccatcgt

SEQ ID NO: 13640 - DNA, 25 bp, Homo sapiens
gtccaccgtggatcgagccatcgtc

SEQ ID NO: 13641 - DNA, 25 bp, Homo sapiens
tccaccgtggatcgagccatcgtca

SEQ ID NO: 13642 - DNA, 25 bp, Homo sapiens
ccaccgtggatcgagccatcgtcag

SEQ ID NO: 13643 - DNA, 25 bp, Homo sapiens
caccgtggatcgagccatcgtcagc

SEQ ID NO: 13644 - DNA, 25 bp, Homo sapiens
accgtggatcgagccatcgtcagca

SEQ ID NO: 13645 - DNA, 25 bp, Homo sapiens
ccgtggatcgagccatcgtcagcag

SEQ ID NO: 13646 - DNA, 25 bp, Homo sapiens
cgtggatcgagccatcgtcagcagg

SEQ ID NO: 13647 - DNA, 25 bp, Homo sapiens
gtggatcgagccatcgtcagcaggc

SEQ ID NO: 13648 - DNA, 25 bp, Homo sapiens
tggatcgagccatcgtcagcaggca

SEQ ID NO: 13649 - DNA, 25 bp, Homo sapiens
ggatcgagccatcgtcagcaggcag

SEQ ID NO: 13650 - DNA, 25 bp, Homo sapiens
gatcgagccatcgtcagcaggcagg

SEQ ID NO: 13651 - DNA, 25 bp, Homo sapiens
atcgagccatcgtcagcaggcagga

SEQ ID NO: 13652 - DNA, 25 bp, Homo sapiens
tcgagccatcgtcagcaggcaggag

SEQ ID NO: 13653 - DNA, 25 bp, Homo sapiens
cgagccatcgtcagcaggcaggagg

SEQ ID NO: 13654 - DNA, 25 bp, Homo sapiens
gagccatcgtcagcaggcaggaggc

SEQ ID NO: 13655 - DNA, 25 bp, Homo sapiens
agccatcgtcagcaggcaggaggcg

SEQ ID NO: 13656 - DNA, 25 bp, Homo sapiens
gccatcgtcagcaggcaggaggcgg

SEQ ID NO: 13657 - DNA, 25 bp, Homo sapiens
ccatcgtcagcaggcaggaggcggt

SEQ ID NO: 13658 - DNA, 25 bp, Homo sapiens
catcgtcagcaggcaggaggcggtc

SEQ ID NO: 13659 - DNA, 25 bp, Homo sapiens
atcgtcagcaggcaggaggcggtca

SEQ ID NO: 13660 - DNA, 25 bp, Homo sapiens
tcgtcagcaggcaggaggcggtcat

SEQ ID NO: 13661 - DNA, 25 bp, Homo sapiens
cgtcagcaggcaggaggcggtcatc

SEQ ID NO: 13662 - DNA, 25 bp, Homo sapiens
gtcagcaggcaggaggcggtcatct

SEQ ID NO: 13663 - DNA, 25 bp, Homo sapiens
tcagcaggcaggaggcggtcatctg

SEQ ID NO: 13664 - DNA, 25 bp, Homo sapiens
cagcaggcaggaggcggtcatctgt

SEQ ID NO: 13665 - DNA, 25 bp, Homo sapiens
agcaggcaggaggcggtcatctgtg

SEQ ID NO: 13666 - DNA, 25 bp, Homo sapiens
gcaggcaggaggcggtcatctgtga

SEQ ID NO: 13667 - DNA, 25 bp, Homo sapiens
caggcaggaggcggtcatctgtgac

SEQ ID NO: 13668 - DNA, 25 bp, Homo sapiens
aggcaggaggcggtcatctgtgacc

SEQ ID NO: 13669 - DNA, 25 bp, Homo sapiens
ggcaggaggcggtcatctgtgacct

SEQ ID NO: 13670 - DNA, 25 bp, Homo sapiens
gcaggaggcggtcatctgtgaccta

SEQ ID NO: 13671 - DNA, 25 bp, Homo sapiens
caggaggcggtcatctgtgacctag

SEQ ID NO: 13672 - DNA, 25 bp, Homo sapiens
aggaggcggtcatctgtgacctaga

SEQ ID NO: 13673 - DNA, 25 bp, Homo sapiens
ggaggcggtcatctgtgacctagag

SEQ ID NO: 13674 - DNA, 25 bp, Homo sapiens
gaggcggtcatctgtgacctagaga

SEQ ID NO: 13675 - DNA, 25 bp, Homo sapiens
aggcggtcatctgtgacctagagaa

SEQ ID NO: 13676 - DNA, 25 bp, Homo sapiens
ggcggtcatctgtgacctagagaac

SEQ ID NO: 13677 - DNA, 25 bp, Homo sapiens
gcggtcatctgtgacctagagaaca

SEQ ID NO: 13678 - DNA, 25 bp, Homo sapiens
cggtcatctgtgacctagagaacaa

SEQ ID NO: 13679 - DNA, 25 bp, Homo sapiens
ggtcatctgtgacctagagaacaag

SEQ ID NO: 13680 - DNA, 25 bp, Homo sapiens
gtcatctgtgacctagagaacaaga

SEQ ID NO: 13681 - DNA, 25 bp, Homo sapiens
tcatctgtgacctagagaacaagac

SEQ ID NO: 13682 - DNA, 25 bp, Homo sapiens
catctgtgacctagagaacaagaca

SEQ ID NO: 13683 - DNA, 25 bp, Homo sapiens
atctgtgacctagagaacaagacag

SEQ ID NO: 13684 - DNA, 25 bp, Homo sapiens
tctgtgacctagagaacaagacaga

SEQ ID NO: 13685 - DNA, 25 bp, Homo sapiens
ctgtgacctagagaacaagacagag

SEQ ID NO: 13686 - DNA, 25 bp, Homo sapiens
tgtgacctagagaacaagacagagt

SEQ ID NO: 13687 - DNA, 25 bp, Homo sapiens
gtgacctagagaacaagacagagtt

SEQ ID NO: 13688 - DNA, 25 bp, Homo sapiens
tgacctagagaacaagacagagttc

SEQ ID NO: 13689 - DNA, 25 bp, Homo sapiens
gacctagagaacaagacagagttcc

SEQ ID NO: 13690 - DNA, 25 bp, Homo sapiens
acctagagaacaagacagagttcca

SEQ ID NO: 13691 - DNA, 25 bp, Homo sapiens
cctagagaacaagacagagttccag

SEQ ID NO: 13692 - DNA, 25 bp, Homo sapiens
ctagagaacaagacagagttccaga

SEQ ID NO: 13693 - DNA, 25 bp, Homo sapiens
tagagaacaagacagagttccagaa

SEQ ID NO: 13694 - DNA, 25 bp, Homo sapiens
agagaacaagacagagttccagaag

SEQ ID NO: 13695 - DNA, 25 bp, Homo sapiens
gagaacaagacagagttccagaagg

SEQ ID NO: 13696 - DNA, 25 bp, Homo sapiens
agaacaagacagagttccagaaggt

SEQ ID NO: 13697 - DNA, 25 bp, Homo sapiens
gaacaagacagagttccagaaggtg

SEQ ID NO: 13698 - DNA, 25 bp, Homo sapiens
aacaagacagagttccagaaggtgc

SEQ ID NO: 13699 - DNA, 25 bp, Homo sapiens
acaagacagagttccagaaggtgca

SEQ ID NO: 13700 - DNA, 25 bp, Homo sapiens
caagacagagttccagaaggtgcag

SEQ ID NO: 13701 - DNA, 25 bp, Homo sapiens
aagacagagttccagaaggtgcaga

SEQ ID NO: 13702 - DNA, 25 bp, Homo sapiens
agacagagttccagaaggtgcagat

SEQ ID NO: 13703 - DNA, 25 bp, Homo sapiens
gacagagttccagaaggtgcagatt

SEQ ID NO: 13704 - DNA, 25 bp, Homo sapiens
acagagttccagaaggtgcagatta

SEQ ID NO: 13705 - DNA, 25 bp, Homo sapiens
cagagttccagaaggtgcagattaa

SEQ ID NO: 13706 - DNA, 25 bp, Homo sapiens
agagttccagaaggtgcagattaag

SEQ ID NO: 13707 - DNA, 25 bp, Homo sapiens
gagttccagaaggtgcagattaaga

SEQ ID NO: 13708 - DNA, 25 bp, Homo sapiens
agttccagaaggtgcagattaagag

SEQ ID NO: 13709 - DNA, 25 bp, Homo sapiens
gttccagaaggtgcagattaagaga

SEQ ID NO: 13710 - DNA, 25 bp, Homo sapiens
ttccagaaggtgcagattaagagat

SEQ ID NO: 13711 - DNA, 25 bp, Homo sapiens
tccagaaggtgcagattaagagatt

SEQ ID NO: 13712 - DNA, 25 bp, Homo sapiens
ccagaaggtgcagattaagagattt

SEQ ID NO: 13713 - DNA, 25 bp, Homo sapiens
cagaaggtgcagattaagagatttg

SEQ ID NO: 13714 - DNA, 25 bp, Homo sapiens
agaaggtgcagattaagagatttga

SEQ ID NO: 13715 - DNA, 25 bp, Homo sapiens
gaaggtgcagattaagagatttgag

SEQ ID NO: 13716 - DNA, 25 bp, Homo sapiens
aaggtgcagattaagagatttgagg

SEQ ID NO: 13717 - DNA, 25 bp, Homo sapiens
aggtgcagattaagagatttgaggt

SEQ ID NO: 13718 - DNA, 25 bp, Homo sapiens
ggtgcagattaagagatttgaggtc

SEQ ID NO: 13719 - DNA, 25 bp, Homo sapiens
gtgcagattaagagatttgaggtcc

SEQ ID NO: 13720 - DNA, 25 bp, Homo sapiens
tgcagattaagagatttgaggtcct

SEQ ID NO: 13721 - DNA, 25 bp, Homo sapiens
gcagattaagagatttgaggtcctg

SEQ ID NO: 13722 - DNA, 25 bp, Homo sapiens
cagattaagagatttgaggtcctgg

SEQ ID NO: 13723 - DNA, 25 bp, Homo sapiens
agattaagagatttgaggtcctggt

SEQ ID NO: 13724 - DNA, 25 bp, Homo sapiens
gattaagagatttgaggtcctggtg

SEQ ID NO: 13725 - DNA, 25 bp, Homo sapiens
attaagagatttgaggtcctggtga

SEQ ID NO: 13726 - DNA, 25 bp, Homo sapiens
ttaagagatttgaggtcctggtgat

SEQ ID NO: 13727 - DNA, 25 bp, Homo sapiens
taagagatttgaggtcctggtgatc

SEQ ID NO: 13728 - DNA, 25 bp, Homo sapiens
aagagatttgaggtcctggtgatcc

SEQ ID NO: 13729 - DNA, 25 bp, Homo sapiens
agagatttgaggtcctggtgatccg

SEQ ID NO: 13730 - DNA, 25 bp, Homo sapiens
gagatttgaggtcctggtgatccgg

SEQ ID NO: 13731 - DNA, 25 bp, Homo sapiens
agatttgaggtcctggtgatccggc

SEQ ID NO: 13732 - DNA, 25 bp, Homo sapiens
gatttgaggtcctggtgatccggct

SEQ ID NO: 13733 - DNA, 25 bp, Homo sapiens
atttgaggtcctggtgatccggctt

SEQ ID NO: 13734 - DNA, 25 bp, Homo sapiens
tttgaggtcctggtgatccggcttc

SEQ ID NO: 13735 - DNA, 25 bp, Homo sapiens
ttgaggtcctggtgatccggcttcg

SEQ ID NO: 13736 - DNA, 25 bp, Homo sapiens
tgaggtcctggtgatccggcttcgg

SEQ ID NO: 13737 - DNA, 25 bp, Homo sapiens
gaggtcctggtgatccggcttcggg

SEQ ID NO: 13738 - DNA, 25 bp, Homo sapiens
aggtcctggtgatccggcttcggga

SEQ ID NO: 13739 - DNA, 25 bp, Homo sapiens
ggtcctggtgatccggcttcgggac

SEQ ID NO: 13740 - DNA, 25 bp, Homo sapiens
gtcctggtgatccggcttcgggaca

SEQ ID NO: 13741 - DNA, 25 bp, Homo sapiens
tcctggtgatccggcttcgggacag

SEQ ID NO: 13742 - DNA, 25 bp, Homo sapiens
cctggtgatccggcttcgggacagc

SEQ ID NO: 13743 - DNA, 25 bp, Homo sapiens
ctggtgatccggcttcgggacagcc

SEQ ID NO: 13744 - DNA, 25 bp, Homo sapiens
tggtgatccggcttcgggacagcct

SEQ ID NO: 13745 - DNA, 25 bp, Homo sapiens
ggtgatccggcttcgggacagcctg

SEQ ID NO: 13746 - DNA, 25 bp, Homo sapiens
gtgatccggcttcgggacagcctga

SEQ ID NO: 13747 - DNA, 25 bp, Homo sapiens
tgatccggcttcgggacagcctgat

SEQ ID NO: 13748 - DNA, 25 bp, Homo sapiens
gatccggcttcgggacagcctgatc

SEQ ID NO: 13749 - DNA, 25 bp, Homo sapiens
atccggcttcgggacagcctgatca

SEQ ID NO: 13750 - DNA, 25 bp, Homo sapiens
tccggcttcgggacagcctgatcaa

SEQ ID NO: 13751 - DNA, 25 bp, Homo sapiens
ccggcttcgggacagcctgatcaag

SEQ ID NO: 13752 - DNA, 25 bp, Homo sapiens
cggcttcgggacagcctgatcaaga

SEQ ID NO: 13753 - DNA, 25 bp, Homo sapiens
ggcttcgggacagcctgatcaagat

SEQ ID NO: 13754 - DNA, 25 bp, Homo sapiens
gcttcgggacagcctgatcaagatg

SEQ ID NO: 13755 - DNA, 25 bp, Homo sapiens
cttcgggacagcctgatcaagatgg

SEQ ID NO: 13756 - DNA, 25 bp, Homo sapiens
ttcgggacagcctgatcaagatggg

SEQ ID NO: 13757 - DNA, 25 bp, Homo sapiens
tcgggacagcctgatcaagatgggg

SEQ ID NO: 13758 - DNA, 25 bp, Homo sapiens
cgggacagcctgatcaagatggggg

SEQ ID NO: 13759 - DNA, 25 bp, Homo sapiens
gggacagcctgatcaagatggggga

SEQ ID NO: 13760 - DNA, 25 bp, Homo sapiens
ggacagcctgatcaagatgggggag

SEQ ID NO: 13761 - DNA, 25 bp, Homo sapiens
gacagcctgatcaagatgggggagg

SEQ ID NO: 13762 - DNA, 25 bp, Homo sapiens
acagcctgatcaagatgggggagga

SEQ ID NO: 13763 - DNA, 25 bp, Homo sapiens
cagcctgatcaagatgggggaggag

SEQ ID NO: 13764 - DNA, 25 bp, Homo sapiens
agcctgatcaagatgggggaggagc

SEQ ID NO: 13765 - DNA, 25 bp, Homo sapiens
gcctgatcaagatgggggaggagct

SEQ ID NO: 13766 - DNA, 25 bp, Homo sapiens
cctgatcaagatgggggaggagctt

SEQ ID NO: 13767 - DNA, 25 bp, Homo sapiens
ctgatcaagatgggggaggagcttt

SEQ ID NO: 13768 - DNA, 25 bp, Homo sapiens
tgatcaagatgggggaggagctttc

SEQ ID NO: 13769 - DNA, 25 bp, Homo sapiens
gatcaagatgggggaggagctttca

SEQ ID NO: 13770 - DNA, 25 bp, Homo sapiens
atcaagatgggggaggagctttcac

SEQ ID NO: 13771 - DNA, 25 bp, Homo sapiens
tcaagatgggggaggagctttcaca

SEQ ID NO: 13772 - DNA, 25 bp, Homo sapiens
caagatgggggaggagctttcacag

SEQ ID NO: 13773 - DNA, 25 bp, Homo sapiens
aagatgggggaggagctttcacagg

SEQ ID NO: 13774 - DNA, 25 bp, Homo sapiens
agatgggggaggagctttcacaggc

SEQ ID NO: 13775 - DNA, 25 bp, Homo sapiens
gatgggggaggagctttcacaggcg

SEQ ID NO: 13776 - DNA, 25 bp, Homo sapiens
atgggggaggagctttcacaggcgg

SEQ ID NO: 13777 - DNA, 25 bp, Homo sapiens
tgggggaggagctttcacaggcggc

SEQ ID NO: 13778 - DNA, 25 bp, Homo sapiens
gggggaggagctttcacaggcggcc

SEQ ID NO: 13779 - DNA, 25 bp, Homo sapiens
ggggaggagctttcacaggcggcca

SEQ ID NO: 13780 - DNA, 25 bp, Homo sapiens
gggaggagctttcacaggcggccac

SEQ ID NO: 13781 - DNA, 25 bp, Homo sapiens
ggaggagctttcacaggcggccacc

SEQ ID NO: 13782 - DNA, 25 bp, Homo sapiens
gaggagctttcacaggcggccacct

SEQ ID NO: 13783 - DNA, 25 bp, Homo sapiens
aggagctttcacaggcggccacctc

SEQ ID NO: 13784 - DNA, 25 bp, Homo sapiens
ggagctttcacaggcggccacctcc

SEQ ID NO: 13785 - DNA, 25 bp, Homo sapiens
gagctttcacaggcggccacctccg

SEQ ID NO: 13786 - DNA, 25 bp, Homo sapiens
agctttcacaggcggccacctccga

SEQ ID NO: 13787 - DNA, 25 bp, Homo sapiens
gctttcacaggcggccacctccgag

SEQ ID NO: 13788 - DNA, 25 bp, Homo sapiens
ctttcacaggcggccacctccgagt

SEQ ID NO: 13789 - DNA, 25 bp, Homo sapiens
tttcacaggcggccacctccgagtc

SEQ ID NO: 13790 - DNA, 25 bp, Homo sapiens
ttcacaggcggccacctccgagtcc

SEQ ID NO: 13791 - DNA, 25 bp, Homo sapiens
tcacaggcggccacctccgagtccc

SEQ ID NO: 13792 - DNA, 25 bp, Homo sapiens
cacaggcggccacctccgagtccca

SEQ ID NO: 13793 - DNA, 25 bp, Homo sapiens
acaggcggccacctccgagtcccag

SEQ ID NO: 13794 - DNA, 25 bp, Homo sapiens
caggcggccacctccgagtcccagc

SEQ ID NO: 13795 - DNA, 25 bp, Homo sapiens
aggcggccacctccgagtcccagca

SEQ ID NO: 13796 - DNA, 25 bp, Homo sapiens
ggcggccacctccgagtcccagcag

SEQ ID NO: 13797 - DNA, 25 bp, Homo sapiens
gcggccacctccgagtcccagcagc

SEQ ID NO: 13798 - DNA, 25 bp, Homo sapiens
cggccacctccgagtcccagcagcg

SEQ ID NO: 13799 - DNA, 25 bp, Homo sapiens
ggccacctccgagtcccagcagcgg

SEQ ID NO: 13800 - DNA, 25 bp, Homo sapiens
gccacctccgagtcccagcagcggg

SEQ ID NO: 13801 - DNA, 25 bp, Homo sapiens
ccacctccgagtcccagcagcggga

SEQ ID NO: 13802 - DNA, 25 bp, Homo sapiens
cacctccgagtcccagcagcgggag

SEQ ID NO: 13803 - DNA, 25 bp, Homo sapiens
acctccgagtcccagcagcgggaga

SEQ ID NO: 13804 - DNA, 25 bp, Homo sapiens
cctccgagtcccagcagcgggagag

SEQ ID NO: 13805 - DNA, 25 bp, Homo sapiens
ctccgagtcccagcagcgggagagc

SEQ ID NO: 13806 - DNA, 25 bp, Homo sapiens
tccgagtcccagcagcgggagagca

SEQ ID NO: 13807 - DNA, 25 bp, Homo sapiens
ccgagtcccagcagcgggagagcag

SEQ ID NO: 13808 - DNA, 25 bp, Homo sapiens
cgagtcccagcagcgggagagcagc

SEQ ID NO: 13809 - DNA, 25 bp, Homo sapiens
gagtcccagcagcgggagagcagcc

SEQ ID NO: 13810 - DNA, 25 bp, Homo sapiens
agtcccagcagcgggagagcagcca

SEQ ID NO: 13811 - DNA, 25 bp, Homo sapiens
gtcccagcagcgggagagcagccag

SEQ ID NO: 13812 - DNA, 25 bp, Homo sapiens
tcccagcagcgggagagcagccagt

SEQ ID NO: 13813 - DNA, 25 bp, Homo sapiens
cccagcagcgggagagcagccagta

SEQ ID NO: 13814 - DNA, 25 bp, Homo sapiens
ccagcagcgggagagcagccagtac

SEQ ID NO: 13815 - DNA, 25 bp, Homo sapiens
cagcagcgggagagcagccagtact

SEQ ID NO: 13816 - DNA, 25 bp, Homo sapiens
agcagcgggagagcagccagtacta

SEQ ID NO: 13817 - DNA, 25 bp, Homo sapiens
gcagcgggagagcagccagtactac

SEQ ID NO: 13818 - DNA, 25 bp, Homo sapiens
cagcgggagagcagccagtactacc

SEQ ID NO: 13819 - DNA, 25 bp, Homo sapiens
agcgggagagcagccagtactacca

SEQ ID NO: 13820 - DNA, 25 bp, Homo sapiens
gcgggagagcagccagtactaccag

SEQ ID NO: 13821 - DNA, 25 bp, Homo sapiens
cgggagagcagccagtactaccagc

SEQ ID NO: 13822 - DNA, 25 bp, Homo sapiens
gggagagcagccagtactaccagcg

SEQ ID NO: 13823 - DNA, 25 bp, Homo sapiens
ggagagcagccagtactaccagcgg

SEQ ID NO: 13824 - DNA, 25 bp, Homo sapiens
gagagcagccagtactaccagcggc

SEQ ID NO: 13825 - DNA, 25 bp, Homo sapiens
agagcagccagtactaccagcggcg

SEQ ID NO: 13826 - DNA, 25 bp, Homo sapiens
gagcagccagtactaccagcggcgc

SEQ ID NO: 13827 - DNA, 25 bp, Homo sapiens
agcagccagtactaccagcggcgcc

SEQ ID NO: 13828 - DNA, 25 bp, Homo sapiens
gcagccagtactaccagcggcgcct

SEQ ID NO: 13829 - DNA, 25 bp, Homo sapiens
cagccagtactaccagcggcgcctg

SEQ ID NO: 13830 - DNA, 25 bp, Homo sapiens
agccagtactaccagcggcgcctgg

SEQ ID NO: 13831 - DNA, 25 bp, Homo sapiens
gccagtactaccagcggcgcctgga

SEQ ID NO: 13832 - DNA, 25 bp, Homo sapiens
ccagtactaccagcggcgcctggaa

SEQ ID NO: 13833 - DNA, 25 bp, Homo sapiens
cagtactaccagcggcgcctggaag

SEQ ID NO: 13834 - DNA, 25 bp, Homo sapiens
agtactaccagcggcgcctggaaga

SEQ ID NO: 13835 - DNA, 25 bp, Homo sapiens
gtactaccagcggcgcctggaagag

SEQ ID NO: 13836 - DNA, 25 bp, Homo sapiens
tactaccagcggcgcctggaagagc

SEQ ID NO: 13837 - DNA, 25 bp, Homo sapiens
actaccagcggcgcctggaagagct

SEQ ID NO: 13838 - DNA, 25 bp, Homo sapiens
ctaccagcggcgcctggaagagctg

SEQ ID NO: 13839 - DNA, 25 bp, Homo sapiens
taccagcggcgcctggaagagctga

SEQ ID NO: 13840 - DNA, 25 bp, Homo sapiens
accagcggcgcctggaagagctgaa

SEQ ID NO: 13841 - DNA, 25 bp, Homo sapiens
ccagcggcgcctggaagagctgaag

SEQ ID NO: 13842 - DNA, 25 bp, Homo sapiens
cagcggcgcctggaagagctgaagg

SEQ ID NO: 13843 - DNA, 25 bp, Homo sapiens
agcggcgcctggaagagctgaaggc

SEQ ID NO: 13844 - DNA, 25 bp, Homo sapiens
gcggcgcctggaagagctgaaggcc

SEQ ID NO: 13845 - DNA, 25 bp, Homo sapiens
cggcgcctggaagagctgaaggccg

SEQ ID NO: 13846 - DNA, 25 bp, Homo sapiens
ggcgcctggaagagctgaaggccga

SEQ ID NO: 13847 - DNA, 25 bp, Homo sapiens
gcgcctggaagagctgaaggccgac

SEQ ID NO: 13848 - DNA, 25 bp, Homo sapiens
cgcctggaagagctgaaggccgaca

SEQ ID NO: 13849 - DNA, 25 bp, Homo sapiens
gcctggaagagctgaaggccgacat

SEQ ID NO: 13850 - DNA, 25 bp, Homo sapiens
cctggaagagctgaaggccgacatg

SEQ ID NO: 13851 - DNA, 25 bp, Homo sapiens
ctggaagagctgaaggccgacatgg

SEQ ID NO: 13852 - DNA, 25 bp, Homo sapiens
tggaagagctgaaggccgacatgga

SEQ ID NO: 13853 - DNA, 25 bp, Homo sapiens
ggaagagctgaaggccgacatggaa

SEQ ID NO: 13854 - DNA, 25 bp, Homo sapiens
gaagagctgaaggccgacatggaag

SEQ ID NO: 13855 - DNA, 25 bp, Homo sapiens
aagagctgaaggccgacatggaaga

SEQ ID NO: 13856 - DNA, 25 bp, Homo sapiens
agagctgaaggccgacatggaagag

SEQ ID NO: 13857 - DNA, 25 bp, Homo sapiens
gagctgaaggccgacatggaagagc

SEQ ID NO: 13858 - DNA, 25 bp, Homo sapiens
agctgaaggccgacatggaagagct

SEQ ID NO: 13859 - DNA, 25 bp, Homo sapiens
gctgaaggccgacatggaagagctg

SEQ ID NO: 13860 - DNA, 25 bp, Homo sapiens
ctgaaggccgacatggaagagctgg

SEQ ID NO: 13861 - DNA, 25 bp, Homo sapiens
tgaaggccgacatggaagagctggt

SEQ ID NO: 13862 - DNA, 25 bp, Homo sapiens
gaaggccgacatggaagagctggtg

SEQ ID NO: 13863 - DNA, 25 bp, Homo sapiens
aaggccgacatggaagagctggtgc

SEQ ID NO: 13864 - DNA, 25 bp, Homo sapiens
aggccgacatggaagagctggtgca

SEQ ID NO: 13865 - DNA, 25 bp, Homo sapiens
ggccgacatggaagagctggtgcag

SEQ ID NO: 13866 - DNA, 25 bp, Homo sapiens
gccgacatggaagagctggtgcagc

SEQ ID NO: 13867 - DNA, 25 bp, Homo sapiens
ccgacatggaagagctggtgcagcg

SEQ ID NO: 13868 - DNA, 25 bp, Homo sapiens
cgacatggaagagctggtgcagcgg

SEQ ID NO: 13869 - DNA, 25 bp, Homo sapiens
gacatggaagagctggtgcagcggg

SEQ ID NO: 13870 - DNA, 25 bp, Homo sapiens
acatggaagagctggtgcagcggga

SEQ ID NO: 13871 - DNA, 25 bp, Homo sapiens
catggaagagctggtgcagcgggag

SEQ ID NO: 13872 - DNA, 25 bp, Homo sapiens
atggaagagctggtgcagcgggagg

SEQ ID NO: 13873 - DNA, 25 bp, Homo sapiens
tggaagagctggtgcagcgggaggc

SEQ ID NO: 13874 - DNA, 25 bp, Homo sapiens
ggaagagctggtgcagcgggaggca

SEQ ID NO: 13875 - DNA, 25 bp, Homo sapiens
gaagagctggtgcagcgggaggcag

SEQ ID NO: 13876 - DNA, 25 bp, Homo sapiens
aagagctggtgcagcgggaggcaga

SEQ ID NO: 13877 - DNA, 25 bp, Homo sapiens
agagctggtgcagcgggaggcagag

SEQ ID NO: 13878 - DNA, 25 bp, Homo sapiens
gagctggtgcagcgggaggcagagg

SEQ ID NO: 13879 - DNA, 25 bp, Homo sapiens
agctggtgcagcgggaggcagaggc

SEQ ID NO: 13880 - DNA, 25 bp, Homo sapiens
gctggtgcagcgggaggcagaggcc

SEQ ID NO: 13881 - DNA, 25 bp, Homo sapiens
ctggtgcagcgggaggcagaggcca

SEQ ID NO: 13882 - DNA, 25 bp, Homo sapiens
tggtgcagcgggaggcagaggccag

SEQ ID NO: 13883 - DNA, 25 bp, Homo sapiens
ggtgcagcgggaggcagaggccagc

SEQ ID NO: 13884 - DNA, 25 bp, Homo sapiens
gtgcagcgggaggcagaggccagcc

SEQ ID NO: 13885 - DNA, 25 bp, Homo sapiens
tgcagcgggaggcagaggccagccg

SEQ ID NO: 13886 - DNA, 25 bp, Homo sapiens
gcagcgggaggcagaggccagccgg

SEQ ID NO: 13887 - DNA, 25 bp, Homo sapiens
cagcgggaggcagaggccagccggc

SEQ ID NO: 13888 - DNA, 25 bp, Homo sapiens
agcgggaggcagaggccagccggcg

SEQ ID NO: 13889 - DNA, 25 bp, Homo sapiens
gcgggaggcagaggccagccggcgg

SEQ ID NO: 13890 - DNA, 25 bp, Homo sapiens
cgggaggcagaggccagccggcggt

SEQ ID NO: 13891 - DNA, 25 bp, Homo sapiens
gggaggcagaggccagccggcggtg

SEQ ID NO: 13892 - DNA, 25 bp, Homo sapiens
ggaggcagaggccagccggcggtgc

SEQ ID NO: 13893 - DNA, 25 bp, Homo sapiens
gaggcagaggccagccggcggtgca

SEQ ID NO: 13894 - DNA, 25 bp, Homo sapiens
aggcagaggccagccggcggtgcat

SEQ ID NO: 13895 - DNA, 25 bp, Homo sapiens
ggcagaggccagccggcggtgcatg

SEQ ID NO: 13896 - DNA, 25 bp, Homo sapiens
gcagaggccagccggcggtgcatgg

SEQ ID NO: 13897 - DNA, 25 bp, Homo sapiens
cagaggccagccggcggtgcatgga

SEQ ID NO: 13898 - DNA, 25 bp, Homo sapiens
agaggccagccggcggtgcatggag

SEQ ID NO: 13899 - DNA, 25 bp, Homo sapiens
gaggccagccggcggtgcatggagc

SEQ ID NO: 13900 - DNA, 25 bp, Homo sapiens
aggccagccggcggtgcatggagct

SEQ ID NO: 13901 - DNA, 25 bp, Homo sapiens
ggccagccggcggtgcatggagctg

SEQ ID NO: 13902 - DNA, 25 bp, Homo sapiens
gccagccggcggtgcatggagctgg

SEQ ID NO: 13903 - DNA, 25 bp, Homo sapiens
ccagccggcggtgcatggagctgga

SEQ ID NO: 13904 - DNA, 25 bp, Homo sapiens
cagccggcggtgcatggagctggag

SEQ ID NO: 13905 - DNA, 25 bp, Homo sapiens
agccggcggtgcatggagctggaga

SEQ ID NO: 13906 - DNA, 25 bp, Homo sapiens
gccggcggtgcatggagctggagaa

SEQ ID NO: 13907 - DNA, 25 bp, Homo sapiens
ccggcggtgcatggagctggagaag

SEQ ID NO: 13908 - DNA, 25 bp, Homo sapiens
cggcggtgcatggagctggagaagt

SEQ ID NO: 13909 - DNA, 25 bp, Homo sapiens
ggcggtgcatggagctggagaagta

SEQ ID NO: 13910 - DNA, 25 bp, Homo sapiens
gcggtgcatggagctggagaagtac

SEQ ID NO: 13911 - DNA, 25 bp, Homo sapiens
cggtgcatggagctggagaagtacg

SEQ ID NO: 13912 - DNA, 25 bp, Homo sapiens
ggtgcatggagctggagaagtacgt

SEQ ID NO: 13913 - DNA, 25 bp, Homo sapiens
gtgcatggagctggagaagtacgtg

SEQ ID NO: 13914 - DNA, 25 bp, Homo sapiens
tgcatggagctggagaagtacgtgg

SEQ ID NO: 13915 - DNA, 25 bp, Homo sapiens
gcatggagctggagaagtacgtgga

SEQ ID NO: 13916 - DNA, 25 bp, Homo sapiens
catggagctggagaagtacgtggag

SEQ ID NO: 13917 - DNA, 25 bp, Homo sapiens
atggagctggagaagtacgtggagg

SEQ ID NO: 13918 - DNA, 25 bp, Homo sapiens
tggagctggagaagtacgtggagga

SEQ ID NO: 13919 - DNA, 25 bp, Homo sapiens
ggagctggagaagtacgtggaggaa

SEQ ID NO: 13920 - DNA, 25 bp, Homo sapiens
gagctggagaagtacgtggaggaac

SEQ ID NO: 13921 - DNA, 25 bp, Homo sapiens
agctggagaagtacgtggaggaact

SEQ ID NO: 13922 - DNA, 25 bp, Homo sapiens
gctggagaagtacgtggaggaactt

SEQ ID NO: 13923 - DNA, 25 bp, Homo sapiens
ctggagaagtacgtggaggaacttg

SEQ ID NO: 13924 - DNA, 25 bp, Homo sapiens
tggagaagtacgtggaggaacttgc

SEQ ID NO: 13925 - DNA, 25 bp, Homo sapiens
ggagaagtacgtggaggaacttgca

SEQ ID NO: 13926 - DNA, 25 bp, Homo sapiens
gagaagtacgtggaggaacttgcag

SEQ ID NO: 13927 - DNA, 25 bp, Homo sapiens
agaagtacgtggaggaacttgcagc

SEQ ID NO: 13928 - DNA, 25 bp, Homo sapiens
gaagtacgtggaggaacttgcagca

SEQ ID NO: 13929 - DNA, 25 bp, Homo sapiens
aagtacgtggaggaacttgcagcag

SEQ ID NO: 13930 - DNA, 25 bp, Homo sapiens
agtacgtggaggaacttgcagcagt

SEQ ID NO: 13931 - DNA, 25 bp, Homo sapiens
gtacgtggaggaacttgcagcagtg

SEQ ID NO: 13932 - DNA, 25 bp, Homo sapiens
tacgtggaggaacttgcagcagtga

SEQ ID NO: 13933 - DNA, 25 bp, Homo sapiens
acgtggaggaacttgcagcagtgag

SEQ ID NO: 13934 - DNA, 25 bp, Homo sapiens
cgtggaggaacttgcagcagtgagg

SEQ ID NO: 13935 - DNA, 25 bp, Homo sapiens
gtggaggaacttgcagcagtgaggc

SEQ ID NO: 13936 - DNA, 25 bp, Homo sapiens
tggaggaacttgcagcagtgaggca

SEQ ID NO: 13937 - DNA, 25 bp, Homo sapiens
ggaggaacttgcagcagtgaggcaa

SEQ ID NO: 13938 - DNA, 25 bp, Homo sapiens
gaggaacttgcagcagtgaggcaaa

SEQ ID NO: 13939 - DNA, 25 bp, Homo sapiens
aggaacttgcagcagtgaggcaaac

SEQ ID NO: 13940 - DNA, 25 bp, Homo sapiens
ggaacttgcagcagtgaggcaaacc

SEQ ID NO: 13941 - DNA, 25 bp, Homo sapiens
gaacttgcagcagtgaggcaaaccc

SEQ ID NO: 13942 - DNA, 25 bp, Homo sapiens
aacttgcagcagtgaggcaaaccct

SEQ ID NO: 13943 - DNA, 25 bp, Homo sapiens
acttgcagcagtgaggcaaaccctc

SEQ ID NO: 13944 - DNA, 25 bp, Homo sapiens
cttgcagcagtgaggcaaaccctcc

SEQ ID NO: 13945 - DNA, 25 bp, Homo sapiens
ttgcagcagtgaggcaaaccctcca

SEQ ID NO: 13946 - DNA, 25 bp, Homo sapiens
tgcagcagtgaggcaaaccctccag

SEQ ID NO: 13947 - DNA, 25 bp, Homo sapiens
gcagcagtgaggcaaaccctccaga

SEQ ID NO: 13948 - DNA, 25 bp, Homo sapiens
cagcagtgaggcaaaccctccagac

SEQ ID NO: 13949 - DNA, 25 bp, Homo sapiens
agcagtgaggcaaaccctccagaca

SEQ ID NO: 13950 - DNA, 25 bp, Homo sapiens
gcagtgaggcaaaccctccagacag

SEQ ID NO: 13951 - DNA, 25 bp, Homo sapiens
cagtgaggcaaaccctccagacaga

SEQ ID NO: 13952 - DNA, 25 bp, Homo sapiens
agtgaggcaaaccctccagacagac

SEQ ID NO: 13953 - DNA, 25 bp, Homo sapiens
gtgaggcaaaccctccagacagacc

SEQ ID NO: 13954 - DNA, 25 bp, Homo sapiens
tgaggcaaaccctccagacagacct

SEQ ID NO: 13955 - DNA, 25 bp, Homo sapiens
gaggcaaaccctccagacagacctg

SEQ ID NO: 13956 - DNA, 25 bp, Homo sapiens
aggcaaaccctccagacagacctgg

SEQ ID NO: 13957 - DNA, 25 bp, Homo sapiens
ggcaaaccctccagacagacctgga

SEQ ID NO: 13958 - DNA, 25 bp, Homo sapiens
gcaaaccctccagacagacctggag

SEQ ID NO: 13959 - DNA, 25 bp, Homo sapiens
caaaccctccagacagacctggaga

SEQ ID NO: 13960 - DNA, 25 bp, Homo sapiens
aaaccctccagacagacctggagac

SEQ ID NO: 13961 - DNA, 25 bp, Homo sapiens
aaccctccagacagacctggagaca

SEQ ID NO: 13962 - DNA, 25 bp, Homo sapiens
accctccagacagacctggagacat

SEQ ID NO: 13963 - DNA, 25 bp, Homo sapiens
ccctccagacagacctggagacatc

SEQ ID NO: 13964 - DNA, 25 bp, Homo sapiens
cctccagacagacctggagacatcc

SEQ ID NO: 13965 - DNA, 25 bp, Homo sapiens
ctccagacagacctggagacatcca

SEQ ID NO: 13966 - DNA, 25 bp, Homo sapiens
tccagacagacctggagacatccat

SEQ ID NO: 13967 - DNA, 25 bp, Homo sapiens
ccagacagacctggagacatccatt

SEQ ID NO: 13968 - DNA, 25 bp, Homo sapiens
cagacagacctggagacatccattc

SEQ ID NO: 13969 - DNA, 25 bp, Homo sapiens
agacagacctggagacatccattcg

SEQ ID NO: 13970 - DNA, 25 bp, Homo sapiens
gacagacctggagacatccattcgg

SEQ ID NO: 13971 - DNA, 25 bp, Homo sapiens
acagacctggagacatccattcggc

SEQ ID NO: 13972 - DNA, 25 bp, Homo sapiens
cagacctggagacatccattcggcg

SEQ ID NO: 13973 - DNA, 25 bp, Homo sapiens
agacctggagacatccattcggcgg

SEQ ID NO: 13974 - DNA, 25 bp, Homo sapiens
gacctggagacatccattcggcgga

SEQ ID NO: 13975 - DNA, 25 bp, Homo sapiens
acctggagacatccattcggcggat

SEQ ID NO: 13976 - DNA, 25 bp, Homo sapiens
cctggagacatccattcggcggatt

SEQ ID NO: 13977 - DNA, 25 bp, Homo sapiens
ctggagacatccattcggcggattg

SEQ ID NO: 13978 - DNA, 25 bp, Homo sapiens
tggagacatccattcggcggattgc

SEQ ID NO: 13979 - DNA, 25 bp, Homo sapiens
ggagacatccattcggcggattgcc

SEQ ID NO: 13980 - DNA, 25 bp, Homo sapiens
gagacatccattcggcggattgccg

SEQ ID NO: 13981 - DNA, 25 bp, Homo sapiens
agacatccattcggcggattgccga

SEQ ID NO: 13982 - DNA, 25 bp, Homo sapiens
gacatccattcggcggattgccgac

SEQ ID NO: 13983 - DNA, 25 bp, Homo sapiens
acatccattcggcggattgccgacc

SEQ ID NO: 13984 - DNA, 25 bp, Homo sapiens
catccattcggcggattgccgacct

SEQ ID NO: 13985 - DNA, 25 bp, Homo sapiens
atccattcggcggattgccgacctg

SEQ ID NO: 13986 - DNA, 25 bp, Homo sapiens
tccattcggcggattgccgacctgc

SEQ ID NO: 13987 - DNA, 25 bp, Homo sapiens
ccattcggcggattgccgacctgca

SEQ ID NO: 13988 - DNA, 25 bp, Homo sapiens
cattcggcggattgccgacctgcag

SEQ ID NO: 13989 - DNA, 25 bp, Homo sapiens
attcggcggattgccgacctgcagg

SEQ ID NO: 13990 - DNA, 25 bp, Homo sapiens
ttcggcggattgccgacctgcaggc

SEQ ID NO: 13991 - DNA, 25 bp, Homo sapiens
tcggcggattgccgacctgcaggct

SEQ ID NO: 13992 - DNA, 25 bp, Homo sapiens
cggcggattgccgacctgcaggctg

SEQ ID NO: 13993 - DNA, 25 bp, Homo sapiens
ggcggattgccgacctgcaggctgc

SEQ ID NO: 13994 - DNA, 25 bp, Homo sapiens
gcggattgccgacctgcaggctgcc

SEQ ID NO: 13995 - DNA, 25 bp, Homo sapiens
cggattgccgacctgcaggctgcct

SEQ ID NO: 13996 - DNA, 25 bp, Homo sapiens
ggattgccgacctgcaggctgcctt

SEQ ID NO: 13997 - DNA, 25 bp, Homo sapiens
gattgccgacctgcaggctgccttg

SEQ ID NO: 13998 - DNA, 25 bp, Homo sapiens
attgccgacctgcaggctgccttgg

SEQ ID NO: 13999 - DNA, 25 bp, Homo sapiens
ttgccgacctgcaggctgccttgga

SEQ ID NO: 14000 - DNA, 25 bp, Homo sapiens
tgccgacctgcaggctgccttggaa

SEQ ID NO: 14001 - DNA, 25 bp, Homo sapiens
gccgacctgcaggctgccttggaag

SEQ ID NO: 14002 - DNA, 25 bp, Homo sapiens
ccgacctgcaggctgccttggaaga

SEQ ID NO: 14003 - DNA, 25 bp, Homo sapiens
cgacctgcaggctgccttggaagaa

SEQ ID NO: 14004 - DNA, 25 bp, Homo sapiens
gacctgcaggctgccttggaagaag

SEQ ID NO: 14005 - DNA, 25 bp, Homo sapiens
acctgcaggctgccttggaagaagt

SEQ ID NO: 14006 - DNA, 25 bp, Homo sapiens
cctgcaggctgccttggaagaagtg

SEQ ID NO: 14007 - DNA, 25 bp, Homo sapiens
ctgcaggctgccttggaagaagtgg

SEQ ID NO: 14008 - DNA, 25 bp, Homo sapiens
tgcaggctgccttggaagaagtggc

SEQ ID NO: 14009 - DNA, 25 bp, Homo sapiens
gcaggctgccttggaagaagtggca

SEQ ID NO: 14010 - DNA, 25 bp, Homo sapiens
caggctgccttggaagaagtggcat

SEQ ID NO: 14011 - DNA, 25 bp, Homo sapiens
aggctgccttggaagaagtggcatc

SEQ ID NO: 14012 - DNA, 25 bp, Homo sapiens
ggctgccttggaagaagtggcatcc

SEQ ID NO: 14013 - DNA, 25 bp, Homo sapiens
gctgccttggaagaagtggcatcca

SEQ ID NO: 14014 - DNA, 25 bp, Homo sapiens
ctgccttggaagaagtggcatccag

SEQ ID NO: 14015 - DNA, 25 bp, Homo sapiens
tgccttggaagaagtggcatccagt

SEQ ID NO: 14016 - DNA, 25 bp, Homo sapiens
gccttggaagaagtggcatccagtg

SEQ ID NO: 14017 - DNA, 25 bp, Homo sapiens
ccttggaagaagtggcatccagtga

SEQ ID NO: 14018 - DNA, 25 bp, Homo sapiens
cttggaagaagtggcatccagtgac

SEQ ID NO: 14019 - DNA, 25 bp, Homo sapiens
ttggaagaagtggcatccagtgaca

SEQ ID NO: 14020 - DNA, 25 bp, Homo sapiens
tggaagaagtggcatccagtgacag

SEQ ID NO: 14021 - DNA, 25 bp, Homo sapiens
ggaagaagtggcatccagtgacagt

SEQ ID NO: 14022 - DNA, 25 bp, Homo sapiens
gaagaagtggcatccagtgacagtg

SEQ ID NO: 14023 - DNA, 25 bp, Homo sapiens
aagaagtggcatccagtgacagtga

SEQ ID NO: 14024 - DNA, 25 bp, Homo sapiens
agaagtggcatccagtgacagtgat

SEQ ID NO: 14025 - DNA, 25 bp, Homo sapiens
gaagtggcatccagtgacagtgata

SEQ ID NO: 14026 - DNA, 25 bp, Homo sapiens
aagtggcatccagtgacagtgatac

SEQ ID NO: 14027 - DNA, 25 bp, Homo sapiens
agtggcatccagtgacagtgatact

SEQ ID NO: 14028 - DNA, 25 bp, Homo sapiens
gtggcatccagtgacagtgatactg

SEQ ID NO: 14029 - DNA, 25 bp, Homo sapiens
tggcatccagtgacagtgatactga

SEQ ID NO: 14030 - DNA, 25 bp, Homo sapiens
ggcatccagtgacagtgatactgag

SEQ ID NO: 14031 - DNA, 25 bp, Homo sapiens
gcatccagtgacagtgatactgaga

SEQ ID NO: 14032 - DNA, 25 bp, Homo sapiens
catccagtgacagtgatactgagag

SEQ ID NO: 14033 - DNA, 25 bp, Homo sapiens
atccagtgacagtgatactgagagt

SEQ ID NO: 14034 - DNA, 25 bp, Homo sapiens
tccagtgacagtgatactgagagtg

SEQ ID NO: 14035 - DNA, 25 bp, Homo sapiens
ccagtgacagtgatactgagagtgt

SEQ ID NO: 14036 - DNA, 25 bp, Homo sapiens
cagtgacagtgatactgagagtgtc

SEQ ID NO: 14037 - DNA, 25 bp, Homo sapiens
agtgacagtgatactgagagtgtcc

SEQ ID NO: 14038 - DNA, 25 bp, Homo sapiens
gtgacagtgatactgagagtgtcca

SEQ ID NO: 14039 - DNA, 25 bp, Homo sapiens
tgacagtgatactgagagtgtccag

SEQ ID NO: 14040 - DNA, 25 bp, Homo sapiens
gacagtgatactgagagtgtccaga

SEQ ID NO: 14041 - DNA, 25 bp, Homo sapiens
acagtgatactgagagtgtccagac

SEQ ID NO: 14042 - DNA, 25 bp, Homo sapiens
cagtgatactgagagtgtccagacg

SEQ ID NO: 14043 - DNA, 25 bp, Homo sapiens
agtgatactgagagtgtccagacgg

SEQ ID NO: 14044 - DNA, 25 bp, Homo sapiens
gtgatactgagagtgtccagacggc

SEQ ID NO: 14045 - DNA, 25 bp, Homo sapiens
tgatactgagagtgtccagacggca

SEQ ID NO: 14046 - DNA, 25 bp, Homo sapiens
gatactgagagtgtccagacggcag

SEQ ID NO: 14047 - DNA, 25 bp, Homo sapiens
atactgagagtgtccagacggcagt

SEQ ID NO: 14048 - DNA, 25 bp, Homo sapiens
tactgagagtgtccagacggcagtg

SEQ ID NO: 14049 - DNA, 25 bp, Homo sapiens
actgagagtgtccagacggcagtgg

SEQ ID NO: 14050 - DNA, 25 bp, Homo sapiens
ctgagagtgtccagacggcagtgga

SEQ ID NO: 14051 - DNA, 25 bp, Homo sapiens
tgagagtgtccagacggcagtggat

SEQ ID NO: 14052 - DNA, 25 bp, Homo sapiens
gagagtgtccagacggcagtggatt

SEQ ID NO: 14053 - DNA, 25 bp, Homo sapiens
agagtgtccagacggcagtggattg

SEQ ID NO: 14054 - DNA, 25 bp, Homo sapiens
gagtgtccagacggcagtggattgt

SEQ ID NO: 14055 - DNA, 25 bp, Homo sapiens
agtgtccagacggcagtggattgtg

SEQ ID NO: 14056 - DNA, 25 bp, Homo sapiens
gtgtccagacggcagtggattgtgg

SEQ ID NO: 14057 - DNA, 25 bp, Homo sapiens
tgtccagacggcagtggattgtggc

SEQ ID NO: 14058 - DNA, 25 bp, Homo sapiens
gtccagacggcagtggattgtggca

SEQ ID NO: 14059 - DNA, 25 bp, Homo sapiens
tccagacggcagtggattgtggcag

SEQ ID NO: 14060 - DNA, 25 bp, Homo sapiens
ccagacggcagtggattgtggcagc

SEQ ID NO: 14061 - DNA, 25 bp, Homo sapiens
cagacggcagtggattgtggcagca

SEQ ID NO: 14062 - DNA, 25 bp, Homo sapiens
agacggcagtggattgtggcagcag

SEQ ID NO: 14063 - DNA, 25 bp, Homo sapiens
gacggcagtggattgtggcagcagc

SEQ ID NO: 14064 - DNA, 25 bp, Homo sapiens
acggcagtggattgtggcagcagcg

SEQ ID NO: 14065 - DNA, 25 bp, Homo sapiens
cggcagtggattgtggcagcagcgg

SEQ ID NO: 14066 - DNA, 25 bp, Homo sapiens
ggcagtggattgtggcagcagcggc

SEQ ID NO: 14067 - DNA, 25 bp, Homo sapiens
gcagtggattgtggcagcagcggcc

SEQ ID NO: 14068 - DNA, 25 bp, Homo sapiens
cagtggattgtggcagcagcggccg

SEQ ID NO: 14069 - DNA, 25 bp, Homo sapiens
agtggattgtggcagcagcggccga

SEQ ID NO: 14070 - DNA, 25 bp, Homo sapiens
gtggattgtggcagcagcggccgaa

SEQ ID NO: 14071 - DNA, 25 bp, Homo sapiens
tggattgtggcagcagcggccgaaa

SEQ ID NO: 14072 - DNA, 25 bp, Homo sapiens
ggattgtggcagcagcggccgaaaa

SEQ ID NO: 14073 - DNA, 25 bp, Homo sapiens
gattgtggcagcagcggccgaaaag

SEQ ID NO: 14074 - DNA, 25 bp, Homo sapiens
attgtggcagcagcggccgaaaaga

SEQ ID NO: 14075 - DNA, 25 bp, Homo sapiens
ttgtggcagcagcggccgaaaagag

SEQ ID NO: 14076 - DNA, 25 bp, Homo sapiens
tgtggcagcagcggccgaaaagaga

SEQ ID NO: 14077 - DNA, 25 bp, Homo sapiens
gtggcagcagcggccgaaaagagat

SEQ ID NO: 14078 - DNA, 25 bp, Homo sapiens
tggcagcagcggccgaaaagagatg

SEQ ID NO: 14079 - DNA, 25 bp, Homo sapiens
ggcagcagcggccgaaaagagatgg

SEQ ID NO: 14080 - DNA, 25 bp, Homo sapiens
gcagcagcggccgaaaagagatgga

SEQ ID NO: 14081 - DNA, 25 bp, Homo sapiens
cagcagcggccgaaaagagatggat

SEQ ID NO: 14082 - DNA, 25 bp, Homo sapiens
agcagcggccgaaaagagatggata

SEQ ID NO: 14083 - DNA, 25 bp, Homo sapiens
gcagcggccgaaaagagatggataa

SEQ ID NO: 14084 - DNA, 25 bp, Homo sapiens
cagcggccgaaaagagatggataac

SEQ ID NO: 14085 - DNA, 25 bp, Homo sapiens
agcggccgaaaagagatggataacg

SEQ ID NO: 14086 - DNA, 25 bp, Homo sapiens
gcggccgaaaagagatggataacgt

SEQ ID NO: 14087 - DNA, 25 bp, Homo sapiens
cggccgaaaagagatggataacgtc

SEQ ID NO: 14088 - DNA, 25 bp, Homo sapiens
ggccgaaaagagatggataacgtct

SEQ ID NO: 14089 - DNA, 25 bp, Homo sapiens
gccgaaaagagatggataacgtctc

SEQ ID NO: 14090 - DNA, 25 bp, Homo sapiens
ccgaaaagagatggataacgtctcc

SEQ ID NO: 14091 - DNA, 25 bp, Homo sapiens
cgaaaagagatggataacgtctcca

SEQ ID NO: 14092 - DNA, 25 bp, Homo sapiens
gaaaagagatggataacgtctccat

SEQ ID NO: 14093 - DNA, 25 bp, Homo sapiens
aaaagagatggataacgtctccatc

SEQ ID NO: 14094 - DNA, 25 bp, Homo sapiens
aaagagatggataacgtctccatcc

SEQ ID NO: 14095 - DNA, 25 bp, Homo sapiens
aagagatggataacgtctccatcct

SEQ ID NO: 14096 - DNA, 25 bp, Homo sapiens
agagatggataacgtctccatcctc

SEQ ID NO: 14097 - DNA, 25 bp, Homo sapiens
gagatggataacgtctccatcctca

SEQ ID NO: 14098 - DNA, 25 bp, Homo sapiens
agatggataacgtctccatcctcag

SEQ ID NO: 14099 - DNA, 25 bp, Homo sapiens
gatggataacgtctccatcctcagc

SEQ ID NO: 14100 - DNA, 25 bp, Homo sapiens
atggataacgtctccatcctcagct

SEQ ID NO: 14101 - DNA, 25 bp, Homo sapiens
tggataacgtctccatcctcagctc

SEQ ID NO: 14102 - DNA, 25 bp, Homo sapiens
ggataacgtctccatcctcagctcc

SEQ ID NO: 14103 - DNA, 25 bp, Homo sapiens
gataacgtctccatcctcagctccc

SEQ ID NO: 14104 - DNA, 25 bp, Homo sapiens
ataacgtctccatcctcagctccca

SEQ ID NO: 14105 - DNA, 25 bp, Homo sapiens
taacgtctccatcctcagctcccag

SEQ ID NO: 14106 - DNA, 25 bp, Homo sapiens
aacgtctccatcctcagctcccagc

SEQ ID NO: 14107 - DNA, 25 bp, Homo sapiens
acgtctccatcctcagctcccagcc

SEQ ID NO: 14108 - DNA, 25 bp, Homo sapiens
cgtctccatcctcagctcccagcca

SEQ ID NO: 14109 - DNA, 25 bp, Homo sapiens
gtctccatcctcagctcccagccag

SEQ ID NO: 14110 - DNA, 25 bp, Homo sapiens
tctccatcctcagctcccagccaga

SEQ ID NO: 14111 - DNA, 25 bp, Homo sapiens
ctccatcctcagctcccagccagag

SEQ ID NO: 14112 - DNA, 25 bp, Homo sapiens
tccatcctcagctcccagccagagg

SEQ ID NO: 14113 - DNA, 25 bp, Homo sapiens
ccatcctcagctcccagccagaggg

SEQ ID NO: 14114 - DNA, 25 bp, Homo sapiens
catcctcagctcccagccagagggc

SEQ ID NO: 14115 - DNA, 25 bp, Homo sapiens
atcctcagctcccagccagagggca

SEQ ID NO: 14116 - DNA, 25 bp, Homo sapiens
tcctcagctcccagccagagggcag

SEQ ID NO: 14117 - DNA, 25 bp, Homo sapiens
cctcagctcccagccagagggcagc

SEQ ID NO: 14118 - DNA, 25 bp, Homo sapiens
ctcagctcccagccagagggcagcc

SEQ ID NO: 14119 - DNA, 25 bp, Homo sapiens
tcagctcccagccagagggcagcct

SEQ ID NO: 14120 - DNA, 25 bp, Homo sapiens
cagctcccagccagagggcagcctg

SEQ ID NO: 14121 - DNA, 25 bp, Homo sapiens
agctcccagccagagggcagcctgc

SEQ ID NO: 14122 - DNA, 25 bp, Homo sapiens
gctcccagccagagggcagcctgca

SEQ ID NO: 14123 - DNA, 25 bp, Homo sapiens
ctcccagccagagggcagcctgcag

SEQ ID NO: 14124 - DNA, 25 bp, Homo sapiens
tcccagccagagggcagcctgcagt

SEQ ID NO: 14125 - DNA, 25 bp, Homo sapiens
cccagccagagggcagcctgcagtc

SEQ ID NO: 14126 - DNA, 25 bp, Homo sapiens
ccagccagagggcagcctgcagtcc

SEQ ID NO: 14127 - DNA, 25 bp, Homo sapiens
cagccagagggcagcctgcagtcct

SEQ ID NO: 14128 - DNA, 25 bp, Homo sapiens
agccagagggcagcctgcagtcctg

SEQ ID NO: 14129 - DNA, 25 bp, Homo sapiens
gccagagggcagcctgcagtcctgg

SEQ ID NO: 14130 - DNA, 25 bp, Homo sapiens
ccagagggcagcctgcagtcctggt

SEQ ID NO: 14131 - DNA, 25 bp, Homo sapiens
cagagggcagcctgcagtcctggtt

SEQ ID NO: 14132 - DNA, 25 bp, Homo sapiens
agagggcagcctgcagtcctggttg

SEQ ID NO: 14133 - DNA, 25 bp, Homo sapiens
gagggcagcctgcagtcctggttga

SEQ ID NO: 14134 - DNA, 25 bp, Homo sapiens
agggcagcctgcagtcctggttgag

SEQ ID NO: 14135 - DNA, 25 bp, Homo sapiens
gggcagcctgcagtcctggttgagc

SEQ ID NO: 14136 - DNA, 25 bp, Homo sapiens
ggcagcctgcagtcctggttgagct

SEQ ID NO: 14137 - DNA, 25 bp, Homo sapiens
gcagcctgcagtcctggttgagctg

SEQ ID NO: 14138 - DNA, 25 bp, Homo sapiens
cagcctgcagtcctggttgagctgt

SEQ ID NO: 14139 - DNA, 25 bp, Homo sapiens
agcctgcagtcctggttgagctgta

SEQ ID NO: 14140 - DNA, 25 bp, Homo sapiens
gcctgcagtcctggttgagctgtac

SEQ ID NO: 14141 - DNA, 25 bp, Homo sapiens
cctgcagtcctggttgagctgtact

SEQ ID NO: 14142 - DNA, 25 bp, Homo sapiens
ctgcagtcctggttgagctgtactc

SEQ ID NO: 14143 - DNA, 25 bp, Homo sapiens
tgcagtcctggttgagctgtactct

SEQ ID NO: 14144 - DNA, 25 bp, Homo sapiens
gcagtcctggttgagctgtactctg

SEQ ID NO: 14145 - DNA, 25 bp, Homo sapiens
cagtcctggttgagctgtactctgt

SEQ ID NO: 14146 - DNA, 25 bp, Homo sapiens
agtcctggttgagctgtactctgtc

SEQ ID NO: 14147 - DNA, 25 bp, Homo sapiens
gtcctggttgagctgtactctgtcc

SEQ ID NO: 14148 - DNA, 25 bp, Homo sapiens
tcctggttgagctgtactctgtccc

SEQ ID NO: 14149 - DNA, 25 bp, Homo sapiens
cctggttgagctgtactctgtccct

SEQ ID NO: 14150 - DNA, 25 bp, Homo sapiens
ctggttgagctgtactctgtccctg

SEQ ID NO: 14151 - DNA, 25 bp, Homo sapiens
tggttgagctgtactctgtccctgg

SEQ ID NO: 14152 - DNA, 25 bp, Homo sapiens
ggttgagctgtactctgtccctggc

SEQ ID NO: 14153 - DNA, 25 bp, Homo sapiens
gttgagctgtactctgtccctggcc

SEQ ID NO: 14154 - DNA, 25 bp, Homo sapiens
ttgagctgtactctgtccctggcca

SEQ ID NO: 14155 - DNA, 25 bp, Homo sapiens
tgagctgtactctgtccctggccac

SEQ ID NO: 14156 - DNA, 25 bp, Homo sapiens
gagctgtactctgtccctggccaca

SEQ ID NO: 14157 - DNA, 25 bp, Homo sapiens
agctgtactctgtccctggccacag

SEQ ID NO: 14158 - DNA, 25 bp, Homo sapiens
gctgtactctgtccctggccacaga

SEQ ID NO: 14159 - DNA, 25 bp, Homo sapiens
ctgtactctgtccctggccacagat

SEQ ID NO: 14160 - DNA, 25 bp, Homo sapiens
tgtactctgtccctggccacagata

SEQ ID NO: 14161 - DNA, 25 bp, Homo sapiens
gtactctgtccctggccacagatac

SEQ ID NO: 14162 - DNA, 25 bp, Homo sapiens
tactctgtccctggccacagatact

SEQ ID NO: 14163 - DNA, 25 bp, Homo sapiens
actctgtccctggccacagatacta

SEQ ID NO: 14164 - DNA, 25 bp, Homo sapiens
ctctgtccctggccacagatactat

SEQ ID NO: 14165 - DNA, 25 bp, Homo sapiens
tctgtccctggccacagatactatg

SEQ ID NO: 14166 - DNA, 25 bp, Homo sapiens
ctgtccctggccacagatactatga

SEQ ID NO: 14167 - DNA, 25 bp, Homo sapiens
tgtccctggccacagatactatgag

SEQ ID NO: 14168 - DNA, 25 bp, Homo sapiens
gtccctggccacagatactatgagg

SEQ ID NO: 14169 - DNA, 25 bp, Homo sapiens
tccctggccacagatactatgagga

SEQ ID NO: 14170 - DNA, 25 bp, Homo sapiens
ccctggccacagatactatgaggac

SEQ ID NO: 14171 - DNA, 25 bp, Homo sapiens
cctggccacagatactatgaggact

SEQ ID NO: 14172 - DNA, 25 bp, Homo sapiens
ctggccacagatactatgaggactc

SEQ ID NO: 14173 - DNA, 25 bp, Homo sapiens
tggccacagatactatgaggactcc

SEQ ID NO: 14174 - DNA, 25 bp, Homo sapiens
ggccacagatactatgaggactcct

SEQ ID NO: 14175 - DNA, 25 bp, Homo sapiens
gccacagatactatgaggactcctt

SEQ ID NO: 14176 - DNA, 25 bp, Homo sapiens
ccacagatactatgaggactccttc

SEQ ID NO: 14177 - DNA, 25 bp, Homo sapiens
cacagatactatgaggactccttct

SEQ ID NO: 14178 - DNA, 25 bp, Homo sapiens
acagatactatgaggactccttctc

SEQ ID NO: 14179 - DNA, 25 bp, Homo sapiens
cagatactatgaggactccttctcg

SEQ ID NO: 14180 - DNA, 25 bp, Homo sapiens
agatactatgaggactccttctcga

SEQ ID NO: 14181 - DNA, 25 bp, Homo sapiens
gatactatgaggactccttctcgac

SEQ ID NO: 14182 - DNA, 25 bp, Homo sapiens
atactatgaggactccttctcgaca

SEQ ID NO: 14183 - DNA, 25 bp, Homo sapiens
tactatgaggactccttctcgacag

SEQ ID NO: 14184 - DNA, 25 bp, Homo sapiens
actatgaggactccttctcgacagt

SEQ ID NO: 14185 - DNA, 25 bp, Homo sapiens
ctatgaggactccttctcgacagtc

SEQ ID NO: 14186 - DNA, 25 bp, Homo sapiens
tatgaggactccttctcgacagtca

SEQ ID NO: 14187 - DNA, 25 bp, Homo sapiens
atgaggactccttctcgacagtcag

SEQ ID NO: 14188 - DNA, 25 bp, Homo sapiens
tgaggactccttctcgacagtcagc

SEQ ID NO: 14189 - DNA, 25 bp, Homo sapiens
gaggactccttctcgacagtcagcc

SEQ ID NO: 14190 - DNA, 25 bp, Homo sapiens
aggactccttctcgacagtcagcca

SEQ ID NO: 14191 - DNA, 25 bp, Homo sapiens
ggactccttctcgacagtcagccac

SEQ ID NO: 14192 - DNA, 25 bp, Homo sapiens
gactccttctcgacagtcagccacc

SEQ ID NO: 14193 - DNA, 25 bp, Homo sapiens
actccttctcgacagtcagccacca

SEQ ID NO: 14194 - DNA, 25 bp, Homo sapiens
ctccttctcgacagtcagccaccag

SEQ ID NO: 14195 - DNA, 25 bp, Homo sapiens
tccttctcgacagtcagccaccagc

SEQ ID NO: 14196 - DNA, 25 bp, Homo sapiens
ccttctcgacagtcagccaccagca

SEQ ID NO: 14197 - DNA, 25 bp, Homo sapiens
cttctcgacagtcagccaccagcag

SEQ ID NO: 14198 - DNA, 25 bp, Homo sapiens
ttctcgacagtcagccaccagcagc

SEQ ID NO: 14199 - DNA, 25 bp, Homo sapiens
tctcgacagtcagccaccagcagcc

SEQ ID NO: 14200 - DNA, 25 bp, Homo sapiens
ctcgacagtcagccaccagcagccg

SEQ ID NO: 14201 - DNA, 25 bp, Homo sapiens
tcgacagtcagccaccagcagccgc

SEQ ID NO: 14202 - DNA, 25 bp, Homo sapiens
cgacagtcagccaccagcagccgca

SEQ ID NO: 14203 - DNA, 25 bp, Homo sapiens
gacagtcagccaccagcagccgcat

SEQ ID NO: 14204 - DNA, 25 bp, Homo sapiens
acagtcagccaccagcagccgcatc

SEQ ID NO: 14205 - DNA, 25 bp, Homo sapiens
cagtcagccaccagcagccgcatcc

SEQ ID NO: 14206 - DNA, 25 bp, Homo sapiens
agtcagccaccagcagccgcatcct

SEQ ID NO: 14207 - DNA, 25 bp, Homo sapiens
gtcagccaccagcagccgcatcctc

SEQ ID NO: 14208 - DNA, 25 bp, Homo sapiens
tcagccaccagcagccgcatcctca

SEQ ID NO: 14209 - DNA, 25 bp, Homo sapiens
cagccaccagcagccgcatcctcag

SEQ ID NO: 14210 - DNA, 25 bp, Homo sapiens
agccaccagcagccgcatcctcagc

SEQ ID NO: 14211 - DNA, 25 bp, Homo sapiens
gccaccagcagccgcatcctcagcc

SEQ ID NO: 14212 - DNA, 25 bp, Homo sapiens
ccaccagcagccgcatcctcagccc

SEQ ID NO: 14213 - DNA, 25 bp, Homo sapiens
caccagcagccgcatcctcagcccc

SEQ ID NO: 14214 - DNA, 25 bp, Homo sapiens
accagcagccgcatcctcagcccca

SEQ ID NO: 14215 - DNA, 25 bp, Homo sapiens
ccagcagccgcatcctcagccccag

SEQ ID NO: 14216 - DNA, 25 bp, Homo sapiens
cagcagccgcatcctcagccccagg

SEQ ID NO: 14217 - DNA, 25 bp, Homo sapiens
agcagccgcatcctcagccccagga

SEQ ID NO: 14218 - DNA, 25 bp, Homo sapiens
gcagccgcatcctcagccccaggat

SEQ ID NO: 14219 - DNA, 25 bp, Homo sapiens
cagccgcatcctcagccccaggata

SEQ ID NO: 14220 - DNA, 25 bp, Homo sapiens
agccgcatcctcagccccaggataa

SEQ ID NO: 14221 - DNA, 25 bp, Homo sapiens
gccgcatcctcagccccaggataaa

SEQ ID NO: 14222 - DNA, 25 bp, Homo sapiens
ccgcatcctcagccccaggataaac

SEQ ID NO: 14223 - DNA, 25 bp, Homo sapiens
cgcatcctcagccccaggataaacg

SEQ ID NO: 14224 - DNA, 25 bp, Homo sapiens
gcatcctcagccccaggataaacga

SEQ ID NO: 14225 - DNA, 25 bp, Homo sapiens
catcctcagccccaggataaacgaa

SEQ ID NO: 14226 - DNA, 25 bp, Homo sapiens
atcctcagccccaggataaacgaag

SEQ ID NO: 14227 - DNA, 25 bp, Homo sapiens
tcctcagccccaggataaacgaaga

SEQ ID NO: 14228 - DNA, 25 bp, Homo sapiens
cctcagccccaggataaacgaagag

SEQ ID NO: 14229 - DNA, 25 bp, Homo sapiens
ctcagccccaggataaacgaagagg

SEQ ID NO: 14230 - DNA, 25 bp, Homo sapiens
tcagccccaggataaacgaagaggc

SEQ ID NO: 14231 - DNA, 25 bp, Homo sapiens
cagccccaggataaacgaagaggct

SEQ ID NO: 14232 - DNA, 25 bp, Homo sapiens
agccccaggataaacgaagaggctg

SEQ ID NO: 14233 - DNA, 25 bp, Homo sapiens
gccccaggataaacgaagaggctgg

SEQ ID NO: 14234 - DNA, 25 bp, Homo sapiens
ccccaggataaacgaagaggctggg

SEQ ID NO: 14235 - DNA, 25 bp, Homo sapiens
cccaggataaacgaagaggctgggg

SEQ ID NO: 14236 - DNA, 25 bp, Homo sapiens
ccaggataaacgaagaggctgggga

SEQ ID NO: 14237 - DNA, 25 bp, Homo sapiens
caggataaacgaagaggctggggac

SEQ ID NO: 14238 - DNA, 25 bp, Homo sapiens
aggataaacgaagaggctggggaca

SEQ ID NO: 14239 - DNA, 25 bp, Homo sapiens
ggataaacgaagaggctggggacac

SEQ ID NO: 14240 - DNA, 25 bp, Homo sapiens
gataaacgaagaggctggggacact

SEQ ID NO: 14241 - DNA, 25 bp, Homo sapiens
ataaacgaagaggctggggacactg

SEQ ID NO: 14242 - DNA, 25 bp, Homo sapiens
taaacgaagaggctggggacactga

SEQ ID NO: 14243 - DNA, 25 bp, Homo sapiens
aaacgaagaggctggggacactgag

SEQ ID NO: 14244 - DNA, 25 bp, Homo sapiens
aacgaagaggctggggacactgaga

SEQ ID NO: 14245 - DNA, 25 bp, Homo sapiens
acgaagaggctggggacactgagag

SEQ ID NO: 14246 - DNA, 25 bp, Homo sapiens
cgaagaggctggggacactgagagg

SEQ ID NO: 14247 - DNA, 25 bp, Homo sapiens
gaagaggctggggacactgagagga

SEQ ID NO: 14248 - DNA, 25 bp, Homo sapiens
aagaggctggggacactgagaggac

SEQ ID NO: 14249 - DNA, 25 bp, Homo sapiens
agaggctggggacactgagaggacc

SEQ ID NO: 14250 - DNA, 25 bp, Homo sapiens
gaggctggggacactgagaggaccc

SEQ ID NO: 14251 - DNA, 25 bp, Homo sapiens
aggctggggacactgagaggaccca

SEQ ID NO: 14252 - DNA, 25 bp, Homo sapiens
ggctggggacactgagaggacccag

SEQ ID NO: 14253 - DNA, 25 bp, Homo sapiens
gctggggacactgagaggacccagt

SEQ ID NO: 14254 - DNA, 25 bp, Homo sapiens
ctggggacactgagaggacccagtc

SEQ ID NO: 14255 - DNA, 25 bp, Homo sapiens
tggggacactgagaggacccagtcg

SEQ ID NO: 14256 - DNA, 25 bp, Homo sapiens
ggggacactgagaggacccagtcgg

SEQ ID NO: 14257 - DNA, 25 bp, Homo sapiens
gggacactgagaggacccagtcggc

SEQ ID NO: 14258 - DNA, 25 bp, Homo sapiens
ggacactgagaggacccagtcggca

SEQ ID NO: 14259 - DNA, 25 bp, Homo sapiens
gacactgagaggacccagtcggcat

SEQ ID NO: 14260 - DNA, 25 bp, Homo sapiens
acactgagaggacccagtcggcatt

SEQ ID NO: 14261 - DNA, 25 bp, Homo sapiens
cactgagaggacccagtcggcattg

SEQ ID NO: 14262 - DNA, 25 bp, Homo sapiens
actgagaggacccagtcggcattgg

SEQ ID NO: 14263 - DNA, 25 bp, Homo sapiens
ctgagaggacccagtcggcattggc

SEQ ID NO: 14264 - DNA, 25 bp, Homo sapiens
tgagaggacccagtcggcattggca

SEQ ID NO: 14265 - DNA, 25 bp, Homo sapiens
gagaggacccagtcggcattggcac

SEQ ID NO: 14266 - DNA, 25 bp, Homo sapiens
agaggacccagtcggcattggcact

SEQ ID NO: 14267 - DNA, 25 bp, Homo sapiens
gaggacccagtcggcattggcactg

SEQ ID NO: 14268 - DNA, 25 bp, Homo sapiens
aggacccagtcggcattggcactga

SEQ ID NO: 14269 - DNA, 25 bp, Homo sapiens
ggacccagtcggcattggcactgag

SEQ ID NO: 14270 - DNA, 25 bp, Homo sapiens
gacccagtcggcattggcactgagc

SEQ ID NO: 14271 - DNA, 25 bp, Homo sapiens
acccagtcggcattggcactgagca

SEQ ID NO: 14272 - DNA, 25 bp, Homo sapiens
cccagtcggcattggcactgagcag

SEQ ID NO: 14273 - DNA, 25 bp, Homo sapiens
ccagtcggcattggcactgagcaga

SEQ ID NO: 14274 - DNA, 25 bp, Homo sapiens
cagtcggcattggcactgagcagag

SEQ ID NO: 14275 - DNA, 25 bp, Homo sapiens
agtcggcattggcactgagcagagc

SEQ ID NO: 14276 - DNA, 25 bp, Homo sapiens
gtcggcattggcactgagcagagcc

SEQ ID NO: 14277 - DNA, 25 bp, Homo sapiens
tcggcattggcactgagcagagccc

SEQ ID NO: 14278 - DNA, 25 bp, Homo sapiens
cggcattggcactgagcagagcccg

SEQ ID NO: 14279 - DNA, 25 bp, Homo sapiens
ggcattggcactgagcagagcccgg

SEQ ID NO: 14280 - DNA, 25 bp, Homo sapiens
gcattggcactgagcagagcccggt

SEQ ID NO: 14281 - DNA, 25 bp, Homo sapiens
cattggcactgagcagagcccggtc

SEQ ID NO: 14282 - DNA, 25 bp, Homo sapiens
attggcactgagcagagcccggtcc

SEQ ID NO: 14283 - DNA, 25 bp, Homo sapiens
ttggcactgagcagagcccggtcca

SEQ ID NO: 14284 - DNA, 25 bp, Homo sapiens
tggcactgagcagagcccggtccac

SEQ ID NO: 14285 - DNA, 25 bp, Homo sapiens
ggcactgagcagagcccggtccacc

SEQ ID NO: 14286 - DNA, 25 bp, Homo sapiens
gcactgagcagagcccggtccacca

SEQ ID NO: 14287 - DNA, 25 bp, Homo sapiens
cactgagcagagcccggtccaccaa

SEQ ID NO: 14288 - DNA, 25 bp, Homo sapiens
actgagcagagcccggtccaccaat

SEQ ID NO: 14289 - DNA, 25 bp, Homo sapiens
ctgagcagagcccggtccaccaatg

SEQ ID NO: 14290 - DNA, 25 bp, Homo sapiens
tgagcagagcccggtccaccaatgt

SEQ ID NO: 14291 - DNA, 25 bp, Homo sapiens
gagcagagcccggtccaccaatgtc

SEQ ID NO: 14292 - DNA, 25 bp, Homo sapiens
agcagagcccggtccaccaatgtcc

SEQ ID NO: 14293 - DNA, 25 bp, Homo sapiens
gcagagcccggtccaccaatgtcca

SEQ ID NO: 14294 - DNA, 25 bp, Homo sapiens
cagagcccggtccaccaatgtccac

SEQ ID NO: 14295 - DNA, 25 bp, Homo sapiens
agagcccggtccaccaatgtccaca

SEQ ID NO: 14296 - DNA, 25 bp, Homo sapiens
gagcccggtccaccaatgtccacag

SEQ ID NO: 14297 - DNA, 25 bp, Homo sapiens
agcccggtccaccaatgtccacagc

SEQ ID NO: 14298 - DNA, 25 bp, Homo sapiens
gcccggtccaccaatgtccacagca

SEQ ID NO: 14299 - DNA, 25 bp, Homo sapiens
cccggtccaccaatgtccacagcaa

SEQ ID NO: 14300 - DNA, 25 bp, Homo sapiens
ccggtccaccaatgtccacagcaag

SEQ ID NO: 14301 - DNA, 25 bp, Homo sapiens
cggtccaccaatgtccacagcaaga

SEQ ID NO: 14302 - DNA, 25 bp, Homo sapiens
ggtccaccaatgtccacagcaagac

SEQ ID NO: 14303 - DNA, 25 bp, Homo sapiens
gtccaccaatgtccacagcaagacc

SEQ ID NO: 14304 - DNA, 25 bp, Homo sapiens
tccaccaatgtccacagcaagacct

SEQ ID NO: 14305 - DNA, 25 bp, Homo sapiens
ccaccaatgtccacagcaagacctc

SEQ ID NO: 14306 - DNA, 25 bp, Homo sapiens
caccaatgtccacagcaagacctca

SEQ ID NO: 14307 - DNA, 25 bp, Homo sapiens
accaatgtccacagcaagacctcag

SEQ ID NO: 14308 - DNA, 25 bp, Homo sapiens
ccaatgtccacagcaagacctcagg

SEQ ID NO: 14309 - DNA, 25 bp, Homo sapiens
caatgtccacagcaagacctcagga

SEQ ID NO: 14310 - DNA, 25 bp, Homo sapiens
aatgtccacagcaagacctcaggag

SEQ ID NO: 14311 - DNA, 25 bp, Homo sapiens
atgtccacagcaagacctcaggaga

SEQ ID NO: 14312 - DNA, 25 bp, Homo sapiens
tgtccacagcaagacctcaggagac

SEQ ID NO: 14313 - DNA, 25 bp, Homo sapiens
gtccacagcaagacctcaggagaca

SEQ ID NO: 14314 - DNA, 25 bp, Homo sapiens
tccacagcaagacctcaggagacaa

SEQ ID NO: 14315 - DNA, 25 bp, Homo sapiens
ccacagcaagacctcaggagacaag

SEQ ID NO: 14316 - DNA, 25 bp, Homo sapiens
cacagcaagacctcaggagacaagc

SEQ ID NO: 14317 - DNA, 25 bp, Homo sapiens
acagcaagacctcaggagacaagcc

SEQ ID NO: 14318 - DNA, 25 bp, Homo sapiens
cagcaagacctcaggagacaagcct

SEQ ID NO: 14319 - DNA, 25 bp, Homo sapiens
agcaagacctcaggagacaagcctg

SEQ ID NO: 14320 - DNA, 25 bp, Homo sapiens
gcaagacctcaggagacaagcctgt

SEQ ID NO: 14321 - DNA, 25 bp, Homo sapiens
caagacctcaggagacaagcctgtt

SEQ ID NO: 14322 - DNA, 25 bp, Homo sapiens
aagacctcaggagacaagcctgttt

SEQ ID NO: 14323 - DNA, 25 bp, Homo sapiens
agacctcaggagacaagcctgtttc

SEQ ID NO: 14324 - DNA, 25 bp, Homo sapiens
gacctcaggagacaagcctgtttct

SEQ ID NO: 14325 - DNA, 25 bp, Homo sapiens
acctcaggagacaagcctgtttctc

SEQ ID NO: 14326 - DNA, 25 bp, Homo sapiens
cctcaggagacaagcctgtttctcc

SEQ ID NO: 14327 - DNA, 25 bp, Homo sapiens
ctcaggagacaagcctgtttctccc

SEQ ID NO: 14328 - DNA, 25 bp, Homo sapiens
tcaggagacaagcctgtttctcccc

SEQ ID NO: 14329 - DNA, 25 bp, Homo sapiens
caggagacaagcctgtttctcccca

SEQ ID NO: 14330 - DNA, 25 bp, Homo sapiens
aggagacaagcctgtttctccccac

SEQ ID NO: 14331 - DNA, 25 bp, Homo sapiens
ggagacaagcctgtttctccccact

SEQ ID NO: 14332 - DNA, 25 bp, Homo sapiens
gagacaagcctgtttctccccactt

SEQ ID NO: 14333 - DNA, 25 bp, Homo sapiens
agacaagcctgtttctccccacttt

SEQ ID NO: 14334 - DNA, 25 bp, Homo sapiens
gacaagcctgtttctccccactttg

SEQ ID NO: 14335 - DNA, 25 bp, Homo sapiens
acaagcctgtttctccccactttgt

SEQ ID NO: 14336 - DNA, 25 bp, Homo sapiens
caagcctgtttctccccactttgtc

SEQ ID NO: 14337 - DNA, 25 bp, Homo sapiens
aagcctgtttctccccactttgtcc

SEQ ID NO: 14338 - DNA, 25 bp, Homo sapiens
agcctgtttctccccactttgtccg

SEQ ID NO: 14339 - DNA, 25 bp, Homo sapiens
gcctgtttctccccactttgtccgc

SEQ ID NO: 14340 - DNA, 25 bp, Homo sapiens
cctgtttctccccactttgtccgcc

SEQ ID NO: 14341 - DNA, 25 bp, Homo sapiens
ctgtttctccccactttgtccgccg

SEQ ID NO: 14342 - DNA, 25 bp, Homo sapiens
tgtttctccccactttgtccgccgg

SEQ ID NO: 14343 - DNA, 25 bp, Homo sapiens
gtttctccccactttgtccgccggc

SEQ ID NO: 14344 - DNA, 25 bp, Homo sapiens
tttctccccactttgtccgccggca

SEQ ID NO: 14345 - DNA, 25 bp, Homo sapiens
ttctccccactttgtccgccggcaa

SEQ ID NO: 14346 - DNA, 25 bp, Homo sapiens
tctccccactttgtccgccggcaaa

SEQ ID NO: 14347 - DNA, 25 bp, Homo sapiens
ctccccactttgtccgccggcaaaa

SEQ ID NO: 14348 - DNA, 25 bp, Homo sapiens
tccccactttgtccgccggcaaaag

SEQ ID NO: 14349 - DNA, 25 bp, Homo sapiens
ccccactttgtccgccggcaaaagt

SEQ ID NO: 14350 - DNA, 25 bp, Homo sapiens
cccactttgtccgccggcaaaagta

SEQ ID NO: 14351 - DNA, 25 bp, Homo sapiens
ccactttgtccgccggcaaaagtac

SEQ ID NO: 14352 - DNA, 25 bp, Homo sapiens
cactttgtccgccggcaaaagtact

SEQ ID NO: 14353 - DNA, 25 bp, Homo sapiens
actttgtccgccggcaaaagtactg

SEQ ID NO: 14354 - DNA, 25 bp, Homo sapiens
ctttgtccgccggcaaaagtactgt

SEQ ID NO: 14355 - DNA, 25 bp, Homo sapiens
tttgtccgccggcaaaagtactgtc

SEQ ID NO: 14356 - DNA, 25 bp, Homo sapiens
ttgtccgccggcaaaagtactgtca

SEQ ID NO: 14357 - DNA, 25 bp, Homo sapiens
tgtccgccggcaaaagtactgtcat

SEQ ID NO: 14358 - DNA, 25 bp, Homo sapiens
gtccgccggcaaaagtactgtcatt

SEQ ID NO: 14359 - DNA, 25 bp, Homo sapiens
tccgccggcaaaagtactgtcattt

SEQ ID NO: 14360 - DNA, 25 bp, Homo sapiens
ccgccggcaaaagtactgtcatttt

SEQ ID NO: 14361 - DNA, 25 bp, Homo sapiens
cgccggcaaaagtactgtcattttg

SEQ ID NO: 14362 - DNA, 25 bp, Homo sapiens
gccggcaaaagtactgtcattttgg

SEQ ID NO: 14363 - DNA, 25 bp, Homo sapiens
ccggcaaaagtactgtcattttggg

SEQ ID NO: 14364 - DNA, 25 bp, Homo sapiens
cggcaaaagtactgtcattttgggg

SEQ ID NO: 14365 - DNA, 25 bp, Homo sapiens
ggcaaaagtactgtcattttgggga

SEQ ID NO: 14366 - DNA, 25 bp, Homo sapiens
gcaaaagtactgtcattttggggac

SEQ ID NO: 14367 - DNA, 25 bp, Homo sapiens
caaaagtactgtcattttggggacg

SEQ ID NO: 14368 - DNA, 25 bp, Homo sapiens
aaaagtactgtcattttggggacgg

SEQ ID NO: 14369 - DNA, 25 bp, Homo sapiens
aaagtactgtcattttggggacggc

SEQ ID NO: 14370 - DNA, 25 bp, Homo sapiens
aagtactgtcattttggggacggcg

SEQ ID NO: 14371 - DNA, 25 bp, Homo sapiens
agtactgtcattttggggacggcga

SEQ ID NO: 14372 - DNA, 25 bp, Homo sapiens
gtactgtcattttggggacggcgaa

SEQ ID NO: 14373 - DNA, 25 bp, Homo sapiens
tactgtcattttggggacggcgaag

SEQ ID NO: 14374 - DNA, 25 bp, Homo sapiens
actgtcattttggggacggcgaagt

SEQ ID NO: 14375 - DNA, 25 bp, Homo sapiens
ctgtcattttggggacggcgaagtg

SEQ ID NO: 14376 - DNA, 25 bp, Homo sapiens
tgtcattttggggacggcgaagtgc

SEQ ID NO: 14377 - DNA, 25 bp, Homo sapiens
gtcattttggggacggcgaagtgct

SEQ ID NO: 14378 - DNA, 25 bp, Homo sapiens
tcattttggggacggcgaagtgctt

SEQ ID NO: 14379 - DNA, 25 bp, Homo sapiens
cattttggggacggcgaagtgcttg

SEQ ID NO: 14380 - DNA, 25 bp, Homo sapiens
attttggggacggcgaagtgcttgc

SEQ ID NO: 14381 - DNA, 25 bp, Homo sapiens
ttttggggacggcgaagtgcttgcc

SEQ ID NO: 14382 - DNA, 25 bp, Homo sapiens
tttggggacggcgaagtgcttgccg

SEQ ID NO: 14383 - DNA, 25 bp, Homo sapiens
ttggggacggcgaagtgcttgccgt

SEQ ID NO: 14384 - DNA, 25 bp, Homo sapiens
tggggacggcgaagtgcttgccgtc

SEQ ID NO: 14385 - DNA, 25 bp, Homo sapiens
ggggacggcgaagtgcttgccgtcc

SEQ ID NO: 14386 - DNA, 25 bp, Homo sapiens
gggacggcgaagtgcttgccgtcca

SEQ ID NO: 14387 - DNA, 25 bp, Homo sapiens
ggacggcgaagtgcttgccgtccag

SEQ ID NO: 14388 - DNA, 25 bp, Homo sapiens
gacggcgaagtgcttgccgtccaga

SEQ ID NO: 14389 - DNA, 25 bp, Homo sapiens
acggcgaagtgcttgccgtccagag

SEQ ID NO: 14390 - DNA, 25 bp, Homo sapiens
cggcgaagtgcttgccgtccagaga

SEQ ID NO: 14391 - DNA, 25 bp, Homo sapiens
ggcgaagtgcttgccgtccagagaa

SEQ ID NO: 14392 - DNA, 25 bp, Homo sapiens
gcgaagtgcttgccgtccagagaaa

SEQ ID NO: 14393 - DNA, 25 bp, Homo sapiens
cgaagtgcttgccgtccagagaaag

SEQ ID NO: 14394 - DNA, 25 bp, Homo sapiens
gaagtgcttgccgtccagagaaagt

SEQ ID NO: 14395 - DNA, 25 bp, Homo sapiens
aagtgcttgccgtccagagaaagtc

SEQ ID NO: 14396 - DNA, 25 bp, Homo sapiens
agtgcttgccgtccagagaaagtcc

SEQ ID NO: 14397 - DNA, 25 bp, Homo sapiens
gtgcttgccgtccagagaaagtcca

SEQ ID NO: 14398 - DNA, 25 bp, Homo sapiens
tgcttgccgtccagagaaagtccac

SEQ ID NO: 14399 - DNA, 25 bp, Homo sapiens
gcttgccgtccagagaaagtccaca

SEQ ID NO: 14400 - DNA, 25 bp, Homo sapiens
cttgccgtccagagaaagtccacag

SEQ ID NO: 14401 - DNA, 25 bp, Homo sapiens
ttgccgtccagagaaagtccacaga

SEQ ID NO: 14402 - DNA, 25 bp, Homo sapiens
tgccgtccagagaaagtccacagag

SEQ ID NO: 14403 - DNA, 25 bp, Homo sapiens
gccgtccagagaaagtccacagaga

SEQ ID NO: 14404 - DNA, 25 bp, Homo sapiens
ccgtccagagaaagtccacagagag

SEQ ID NO: 14405 - DNA, 25 bp, Homo sapiens
cgtccagagaaagtccacagagaga

SEQ ID NO: 14406 - DNA, 25 bp, Homo sapiens
gtccagagaaagtccacagagagat

SEQ ID NO: 14407 - DNA, 25 bp, Homo sapiens
tccagagaaagtccacagagagatt

SEQ ID NO: 14408 - DNA, 25 bp, Homo sapiens
ccagagaaagtccacagagagatta

SEQ ID NO: 14409 - DNA, 25 bp, Homo sapiens
cagagaaagtccacagagagattag

SEQ ID NO: 14410 - DNA, 25 bp, Homo sapiens
agagaaagtccacagagagattaga

SEQ ID NO: 14411 - DNA, 25 bp, Homo sapiens
gagaaagtccacagagagattagaa

SEQ ID NO: 14412 - DNA, 25 bp, Homo sapiens
agaaagtccacagagagattagaac

SEQ ID NO: 14413 - DNA, 25 bp, Homo sapiens
gaaagtccacagagagattagaacc

SEQ ID NO: 14414 - DNA, 25 bp, Homo sapiens
aaagtccacagagagattagaacct

SEQ ID NO: 14415 - DNA, 25 bp, Homo sapiens
aagtccacagagagattagaacctg

SEQ ID NO: 14416 - DNA, 25 bp, Homo sapiens
agtccacagagagattagaacctgc

SEQ ID NO: 14417 - DNA, 25 bp, Homo sapiens
gtccacagagagattagaacctgct

SEQ ID NO: 14418 - DNA, 25 bp, Homo sapiens
tccacagagagattagaacctgctt

SEQ ID NO: 14419 - DNA, 25 bp, Homo sapiens
ccacagagagattagaacctgcttc

SEQ ID NO: 14420 - DNA, 25 bp, Homo sapiens
cacagagagattagaacctgcttcc

SEQ ID NO: 14421 - DNA, 25 bp, Homo sapiens
acagagagattagaacctgcttcct

SEQ ID NO: 14422 - DNA, 25 bp, Homo sapiens
cagagagattagaacctgcttcctc

SEQ ID NO: 14423 - DNA, 25 bp, Homo sapiens
agagagattagaacctgcttcctct

SEQ ID NO: 14424 - DNA, 25 bp, Homo sapiens
gagagattagaacctgcttcctctc

SEQ ID NO: 14425 - DNA, 25 bp, Homo sapiens
agagattagaacctgcttcctctcc

SEQ ID NO: 14426 - DNA, 25 bp, Homo sapiens
gagattagaacctgcttcctctccc

SEQ ID NO: 14427 - DNA, 25 bp, Homo sapiens
agattagaacctgcttcctctcccc

SEQ ID NO: 14428 - DNA, 25 bp, Homo sapiens
gattagaacctgcttcctctcccct

SEQ ID NO: 14429 - DNA, 25 bp, Homo sapiens
attagaacctgcttcctctcccctg

SEQ ID NO: 14430 - DNA, 25 bp, Homo sapiens
ttagaacctgcttcctctcccctgg

SEQ ID NO: 14431 - DNA, 25 bp, Homo sapiens
tagaacctgcttcctctcccctggc

SEQ ID NO: 14432 - DNA, 25 bp, Homo sapiens
agaacctgcttcctctcccctggct

SEQ ID NO: 14433 - DNA, 25 bp, Homo sapiens
gaacctgcttcctctcccctggctt

SEQ ID NO: 14434 - DNA, 25 bp, Homo sapiens
aacctgcttcctctcccctggcttc

SEQ ID NO: 14435 - DNA, 25 bp, Homo sapiens
acctgcttcctctcccctggcttct

SEQ ID NO: 14436 - DNA, 25 bp, Homo sapiens
cctgcttcctctcccctggcttctc

SEQ ID NO: 14437 - DNA, 25 bp, Homo sapiens
ctgcttcctctcccctggcttctcg

SEQ ID NO: 14438 - DNA, 25 bp, Homo sapiens
tgcttcctctcccctggcttctcgg

SEQ ID NO: 14439 - DNA, 25 bp, Homo sapiens
gcttcctctcccctggcttctcgga

SEQ ID NO: 14440 - DNA, 25 bp, Homo sapiens
cttcctctcccctggcttctcggag

SEQ ID NO: 14441 - DNA, 25 bp, Homo sapiens
ttcctctcccctggcttctcggagt

SEQ ID NO: 14442 - DNA, 25 bp, Homo sapiens
tcctctcccctggcttctcggagta

SEQ ID NO: 14443 - DNA, 25 bp, Homo sapiens
cctctcccctggcttctcggagtac

SEQ ID NO: 14444 - DNA, 25 bp, Homo sapiens
ctctcccctggcttctcggagtaca

SEQ ID NO: 14445 - DNA, 25 bp, Homo sapiens
tctcccctggcttctcggagtacaa

SEQ ID NO: 14446 - DNA, 25 bp, Homo sapiens
ctcccctggcttctcggagtacaaa

SEQ ID NO: 14447 - DNA, 25 bp, Homo sapiens
tcccctggcttctcggagtacaaat

SEQ ID NO: 14448 - DNA, 25 bp, Homo sapiens
cccctggcttctcggagtacaaata

SEQ ID NO: 14449 - DNA, 25 bp, Homo sapiens
ccctggcttctcggagtacaaatac

SEQ ID NO: 14450 - DNA, 25 bp, Homo sapiens
cctggcttctcggagtacaaataca

SEQ ID NO: 14451 - DNA, 25 bp, Homo sapiens
ctggcttctcggagtacaaatacat

SEQ ID NO: 14452 - DNA, 25 bp, Homo sapiens
tggcttctcggagtacaaatacatc

SEQ ID NO: 14453 - DNA, 25 bp, Homo sapiens
ggcttctcggagtacaaatacatcc

SEQ ID NO: 14454 - DNA, 25 bp, Homo sapiens
gcttctcggagtacaaatacatccc

SEQ ID NO: 14455 - DNA, 25 bp, Homo sapiens
cttctcggagtacaaatacatcccc

SEQ ID NO: 14456 - DNA, 25 bp, Homo sapiens
ttctcggagtacaaatacatccccg

SEQ ID NO: 14457 - DNA, 25 bp, Homo sapiens
tctcggagtacaaatacatccccgc

SEQ ID NO: 14458 - DNA, 25 bp, Homo sapiens
ctcggagtacaaatacatccccgct

SEQ ID NO: 14459 - DNA, 25 bp, Homo sapiens
tcggagtacaaatacatccccgctg

SEQ ID NO: 14460 - DNA, 25 bp, Homo sapiens
cggagtacaaatacatccccgctgt

SEQ ID NO: 14461 - DNA, 25 bp, Homo sapiens
ggagtacaaatacatccccgctgtc

SEQ ID NO: 14462 - DNA, 25 bp, Homo sapiens
gagtacaaatacatccccgctgtcg

SEQ ID NO: 14463 - DNA, 25 bp, Homo sapiens
agtacaaatacatccccgctgtcga

SEQ ID NO: 14464 - DNA, 25 bp, Homo sapiens
gtacaaatacatccccgctgtcgag

SEQ ID NO: 14465 - DNA, 25 bp, Homo sapiens
tacaaatacatccccgctgtcgagg

SEQ ID NO: 14466 - DNA, 25 bp, Homo sapiens
acaaatacatccccgctgtcgaggg

SEQ ID NO: 14467 - DNA, 25 bp, Homo sapiens
caaatacatccccgctgtcgaggga

SEQ ID NO: 14468 - DNA, 25 bp, Homo sapiens
aaatacatccccgctgtcgagggaa

SEQ ID NO: 14469 - DNA, 25 bp, Homo sapiens
aatacatccccgctgtcgagggaaa

SEQ ID NO: 14470 - DNA, 25 bp, Homo sapiens
atacatccccgctgtcgagggaaaa

SEQ ID NO: 14471 - DNA, 25 bp, Homo sapiens
tacatccccgctgtcgagggaaaag

SEQ ID NO: 14472 - DNA, 25 bp, Homo sapiens
acatccccgctgtcgagggaaaagc

SEQ ID NO: 14473 - DNA, 25 bp, Homo sapiens
catccccgctgtcgagggaaaagct

SEQ ID NO: 14474 - DNA, 25 bp, Homo sapiens
atccccgctgtcgagggaaaagctg

SEQ ID NO: 14475 - DNA, 25 bp, Homo sapiens
tccccgctgtcgagggaaaagctgc

SEQ ID NO: 14476 - DNA, 25 bp, Homo sapiens
ccccgctgtcgagggaaaagctgcc

SEQ ID NO: 14477 - DNA, 25 bp, Homo sapiens
cccgctgtcgagggaaaagctgccc

SEQ ID NO: 14478 - DNA, 25 bp, Homo sapiens
ccgctgtcgagggaaaagctgccca

SEQ ID NO: 14479 - DNA, 25 bp, Homo sapiens
cgctgtcgagggaaaagctgcccag

SEQ ID NO: 14480 - DNA, 25 bp, Homo sapiens
gctgtcgagggaaaagctgcccagt

SEQ ID NO: 14481 - DNA, 25 bp, Homo sapiens
ctgtcgagggaaaagctgcccagtc

SEQ ID NO: 14482 - DNA, 25 bp, Homo sapiens
tgtcgagggaaaagctgcccagtcc

SEQ ID NO: 14483 - DNA, 25 bp, Homo sapiens
gtcgagggaaaagctgcccagtcct

SEQ ID NO: 14484 - DNA, 25 bp, Homo sapiens
tcgagggaaaagctgcccagtcctt

SEQ ID NO: 14485 - DNA, 25 bp, Homo sapiens
cgagggaaaagctgcccagtccttc

SEQ ID NO: 14486 - DNA, 25 bp, Homo sapiens
gagggaaaagctgcccagtccttca

SEQ ID NO: 14487 - DNA, 25 bp, Homo sapiens
agggaaaagctgcccagtccttcag

SEQ ID NO: 14488 - DNA, 25 bp, Homo sapiens
gggaaaagctgcccagtccttcagc

SEQ ID NO: 14489 - DNA, 25 bp, Homo sapiens
ggaaaagctgcccagtccttcagcg

SEQ ID NO: 14490 - DNA, 25 bp, Homo sapiens
gaaaagctgcccagtccttcagcgg

SEQ ID NO: 14491 - DNA, 25 bp, Homo sapiens
aaaagctgcccagtccttcagcggc

SEQ ID NO: 14492 - DNA, 25 bp, Homo sapiens
aaagctgcccagtccttcagcggcc

SEQ ID NO: 14493 - DNA, 25 bp, Homo sapiens
aagctgcccagtccttcagcggccc

SEQ ID NO: 14494 - DNA, 25 bp, Homo sapiens
agctgcccagtccttcagcggccct

SEQ ID NO: 14495 - DNA, 25 bp, Homo sapiens
gctgcccagtccttcagcggccctc

SEQ ID NO: 14496 - DNA, 25 bp, Homo sapiens
ctgcccagtccttcagcggccctct

SEQ ID NO: 14497 - DNA, 25 bp, Homo sapiens
tgcccagtccttcagcggccctctc

SEQ ID NO: 14498 - DNA, 25 bp, Homo sapiens
gcccagtccttcagcggccctctcg

SEQ ID NO: 14499 - DNA, 25 bp, Homo sapiens
cccagtccttcagcggccctctcgg

SEQ ID NO: 14500 - DNA, 25 bp, Homo sapiens
ccagtccttcagcggccctctcgga

SEQ ID NO: 14501 - DNA, 25 bp, Homo sapiens
cagtccttcagcggccctctcggag

SEQ ID NO: 14502 - DNA, 25 bp, Homo sapiens
agtccttcagcggccctctcggagt

SEQ ID NO: 14503 - DNA, 25 bp, Homo sapiens
gtccttcagcggccctctcggagtt

SEQ ID NO: 14504 - DNA, 25 bp, Homo sapiens
tccttcagcggccctctcggagttc

SEQ ID NO: 14505 - DNA, 25 bp, Homo sapiens
ccttcagcggccctctcggagttcg

SEQ ID NO: 14506 - DNA, 25 bp, Homo sapiens
cttcagcggccctctcggagttcgt

SEQ ID NO: 14507 - DNA, 25 bp, Homo sapiens
ttcagcggccctctcggagttcgtg

SEQ ID NO: 14508 - DNA, 25 bp, Homo sapiens
tcagcggccctctcggagttcgtgg

SEQ ID NO: 14509 - DNA, 25 bp, Homo sapiens
cagcggccctctcggagttcgtgga

SEQ ID NO: 14510 - DNA, 25 bp, Homo sapiens
agcggccctctcggagttcgtggaa

SEQ ID NO: 14511 - DNA, 25 bp, Homo sapiens
gcggccctctcggagttcgtggaag

SEQ ID NO: 14512 - DNA, 25 bp, Homo sapiens
cggccctctcggagttcgtggaagg

SEQ ID NO: 14513 - DNA, 25 bp, Homo sapiens
ggccctctcggagttcgtggaaggg

SEQ ID NO: 14514 - DNA, 25 bp, Homo sapiens
gccctctcggagttcgtggaagggc

SEQ ID NO: 14515 - DNA, 25 bp, Homo sapiens
ccctctcggagttcgtggaagggct

SEQ ID NO: 14516 - DNA, 25 bp, Homo sapiens
cctctcggagttcgtggaagggctc

SEQ ID NO: 14517 - DNA, 25 bp, Homo sapiens
ctctcggagttcgtggaagggctcc

SEQ ID NO: 14518 - DNA, 25 bp, Homo sapiens
tctcggagttcgtggaagggctccg

SEQ ID NO: 14519 - DNA, 25 bp, Homo sapiens
ctcggagttcgtggaagggctccgg

SEQ ID NO: 14520 - DNA, 25 bp, Homo sapiens
tcggagttcgtggaagggctccgga

SEQ ID NO: 14521 - DNA, 25 bp, Homo sapiens
cggagttcgtggaagggctccggag

SEQ ID NO: 14522 - DNA, 25 bp, Homo sapiens
ggagttcgtggaagggctccggagg

SEQ ID NO: 14523 - DNA, 25 bp, Homo sapiens
gagttcgtggaagggctccggagga

SEQ ID NO: 14524 - DNA, 25 bp, Homo sapiens
agttcgtggaagggctccggaggaa

SEQ ID NO: 14525 - DNA, 25 bp, Homo sapiens
gttcgtggaagggctccggaggaag

SEQ ID NO: 14526 - DNA, 25 bp, Homo sapiens
ttcgtggaagggctccggaggaaga

SEQ ID NO: 14527 - DNA, 25 bp, Homo sapiens
tcgtggaagggctccggaggaagag

SEQ ID NO: 14528 - DNA, 25 bp, Homo sapiens
cgtggaagggctccggaggaagaga

SEQ ID NO: 14529 - DNA, 25 bp, Homo sapiens
gtggaagggctccggaggaagagag

SEQ ID NO: 14530 - DNA, 25 bp, Homo sapiens
tggaagggctccggaggaagagagc

SEQ ID NO: 14531 - DNA, 25 bp, Homo sapiens
ggaagggctccggaggaagagagcc

SEQ ID NO: 14532 - DNA, 25 bp, Homo sapiens
gaagggctccggaggaagagagccc

SEQ ID NO: 14533 - DNA, 25 bp, Homo sapiens
aagggctccggaggaagagagccca

SEQ ID NO: 14534 - DNA, 25 bp, Homo sapiens
agggctccggaggaagagagcccag

SEQ ID NO: 14535 - DNA, 25 bp, Homo sapiens
gggctccggaggaagagagcccaga

SEQ ID NO: 14536 - DNA, 25 bp, Homo sapiens
ggctccggaggaagagagcccagag

SEQ ID NO: 14537 - DNA, 25 bp, Homo sapiens
gctccggaggaagagagcccagaga

SEQ ID NO: 14538 - DNA, 25 bp, Homo sapiens
ctccggaggaagagagcccagagag

SEQ ID NO: 14539 - DNA, 25 bp, Homo sapiens
tccggaggaagagagcccagagagg

SEQ ID NO: 14540 - DNA, 25 bp, Homo sapiens
ccggaggaagagagcccagagaggc

SEQ ID NO: 14541 - DNA, 25 bp, Homo sapiens
cggaggaagagagcccagagaggcc

SEQ ID NO: 14542 - DNA, 25 bp, Homo sapiens
ggaggaagagagcccagagaggcca

SEQ ID NO: 14543 - DNA, 25 bp, Homo sapiens
gaggaagagagcccagagaggccag

SEQ ID NO: 14544 - DNA, 25 bp, Homo sapiens
aggaagagagcccagagaggccagg

SEQ ID NO: 14545 - DNA, 25 bp, Homo sapiens
ggaagagagcccagagaggccaggg

SEQ ID NO: 14546 - DNA, 25 bp, Homo sapiens
gaagagagcccagagaggccagggg

SEQ ID NO: 14547 - DNA, 25 bp, Homo sapiens
aagagagcccagagaggccaggggt

SEQ ID NO: 14548 - DNA, 25 bp, Homo sapiens
agagagcccagagaggccaggggtc

SEQ ID NO: 14549 - DNA, 25 bp, Homo sapiens
gagagcccagagaggccaggggtcc

SEQ ID NO: 14550 - DNA, 25 bp, Homo sapiens
agagcccagagaggccaggggtcca

SEQ ID NO: 14551 - DNA, 25 bp, Homo sapiens
gagcccagagaggccaggggtccac

SEQ ID NO: 14552 - DNA, 25 bp, Homo sapiens
agcccagagaggccaggggtccacg

SEQ ID NO: 14553 - DNA, 25 bp, Homo sapiens
gcccagagaggccaggggtccacgc

SEQ ID NO: 14554 - DNA, 25 bp, Homo sapiens
cccagagaggccaggggtccacgct

SEQ ID NO: 14555 - DNA, 25 bp, Homo sapiens
ccagagaggccaggggtccacgctg

SEQ ID NO: 14556 - DNA, 25 bp, Homo sapiens
cagagaggccaggggtccacgctgg

SEQ ID NO: 14557 - DNA, 25 bp, Homo sapiens
agagaggccaggggtccacgctggg

SEQ ID NO: 14558 - DNA, 25 bp, Homo sapiens
gagaggccaggggtccacgctgggc

SEQ ID NO: 14559 - DNA, 25 bp, Homo sapiens
agaggccaggggtccacgctgggcc

SEQ ID NO: 14560 - DNA, 25 bp, Homo sapiens
gaggccaggggtccacgctgggcct

SEQ ID NO: 14561 - DNA, 25 bp, Homo sapiens
aggccaggggtccacgctgggccta

SEQ ID NO: 14562 - DNA, 25 bp, Homo sapiens
ggccaggggtccacgctgggcctag

SEQ ID NO: 14563 - DNA, 25 bp, Homo sapiens
gccaggggtccacgctgggcctaga

SEQ ID NO: 14564 - DNA, 25 bp, Homo sapiens
ccaggggtccacgctgggcctagag

SEQ ID NO: 14565 - DNA, 25 bp, Homo sapiens
caggggtccacgctgggcctagagg

SEQ ID NO: 14566 - DNA, 25 bp, Homo sapiens
aggggtccacgctgggcctagagga

SEQ ID NO: 14567 - DNA, 25 bp, Homo sapiens
ggggtccacgctgggcctagaggac

SEQ ID NO: 14568 - DNA, 25 bp, Homo sapiens
gggtccacgctgggcctagaggact

SEQ ID NO: 14569 - DNA, 25 bp, Homo sapiens
ggtccacgctgggcctagaggactg

SEQ ID NO: 14570 - DNA, 25 bp, Homo sapiens
gtccacgctgggcctagaggactgg

SEQ ID NO: 14571 - DNA, 25 bp, Homo sapiens
tccacgctgggcctagaggactggc

SEQ ID NO: 14572 - DNA, 25 bp, Homo sapiens
ccacgctgggcctagaggactggcc

SEQ ID NO: 14573 - DNA, 25 bp, Homo sapiens
cacgctgggcctagaggactggccc

SEQ ID NO: 14574 - DNA, 25 bp, Homo sapiens
acgctgggcctagaggactggccca

SEQ ID NO: 14575 - DNA, 25 bp, Homo sapiens
cgctgggcctagaggactggcccac

SEQ ID NO: 14576 - DNA, 25 bp, Homo sapiens
gctgggcctagaggactggcccact

SEQ ID NO: 14577 - DNA, 25 bp, Homo sapiens
ctgggcctagaggactggcccactc

SEQ ID NO: 14578 - DNA, 25 bp, Homo sapiens
tgggcctagaggactggcccactct

SEQ ID NO: 14579 - DNA, 25 bp, Homo sapiens
gggcctagaggactggcccactctc

SEQ ID NO: 14580 - DNA, 25 bp, Homo sapiens
ggcctagaggactggcccactctcc

SEQ ID NO: 14581 - DNA, 25 bp, Homo sapiens
gcctagaggactggcccactctccc

SEQ ID NO: 14582 - DNA, 25 bp, Homo sapiens
cctagaggactggcccactctcccc

SEQ ID NO: 14583 - DNA, 25 bp, Homo sapiens
ctagaggactggcccactctcccca

SEQ ID NO: 14584 - DNA, 25 bp, Homo sapiens
tagaggactggcccactctccccat

SEQ ID NO: 14585 - DNA, 25 bp, Homo sapiens
agaggactggcccactctccccatt

SEQ ID NO: 14586 - DNA, 25 bp, Homo sapiens
gaggactggcccactctccccattt

SEQ ID NO: 14587 - DNA, 25 bp, Homo sapiens
aggactggcccactctccccattta

SEQ ID NO: 14588 - DNA, 25 bp, Homo sapiens
ggactggcccactctccccatttac

SEQ ID NO: 14589 - DNA, 25 bp, Homo sapiens
gactggcccactctccccatttacc

SEQ ID NO: 14590 - DNA, 25 bp, Homo sapiens
actggcccactctccccatttacca

SEQ ID NO: 14591 - DNA, 25 bp, Homo sapiens
ctggcccactctccccatttaccag

SEQ ID NO: 14592 - DNA, 25 bp, Homo sapiens
tggcccactctccccatttaccaga

SEQ ID NO: 14593 - DNA, 25 bp, Homo sapiens
ggcccactctccccatttaccagac

SEQ ID NO: 14594 - DNA, 25 bp, Homo sapiens
gcccactctccccatttaccagacg

SEQ ID NO: 14595 - DNA, 25 bp, Homo sapiens
cccactctccccatttaccagacga

SEQ ID NO: 14596 - DNA, 25 bp, Homo sapiens
ccactctccccatttaccagacgac

SEQ ID NO: 14597 - DNA, 25 bp, Homo sapiens
cactctccccatttaccagacgact

SEQ ID NO: 14598 - DNA, 25 bp, Homo sapiens
actctccccatttaccagacgactg

SEQ ID NO: 14599 - DNA, 25 bp, Homo sapiens
ctctccccatttaccagacgactgg

SEQ ID NO: 14600 - DNA, 25 bp, Homo sapiens
tctccccatttaccagacgactggg

SEQ ID NO: 14601 - DNA, 25 bp, Homo sapiens
ctccccatttaccagacgactgggg

SEQ ID NO: 14602 - DNA, 25 bp, Homo sapiens
tccccatttaccagacgactggggc

SEQ ID NO: 14603 - DNA, 25 bp, Homo sapiens
ccccatttaccagacgactggggcc

SEQ ID NO: 14604 - DNA, 25 bp, Homo sapiens
cccatttaccagacgactggggcct

SEQ ID NO: 14605 - DNA, 25 bp, Homo sapiens
ccatttaccagacgactggggcctc

SEQ ID NO: 14606 - DNA, 25 bp, Homo sapiens
catttaccagacgactggggcctcc

SEQ ID NO: 14607 - DNA, 25 bp, Homo sapiens
atttaccagacgactggggcctcca

SEQ ID NO: 14608 - DNA, 25 bp, Homo sapiens
tttaccagacgactggggcctccac

SEQ ID NO: 14609 - DNA, 25 bp, Homo sapiens
ttaccagacgactggggcctccaca

SEQ ID NO: 14610 - DNA, 25 bp, Homo sapiens
taccagacgactggggcctccacac

SEQ ID NO: 14611 - DNA, 25 bp, Homo sapiens
accagacgactggggcctccacact

SEQ ID NO: 14612 - DNA, 25 bp, Homo sapiens
ccagacgactggggcctccacacta

SEQ ID NO: 14613 - DNA, 25 bp, Homo sapiens
cagacgactggggcctccacactaa

SEQ ID NO: 14614 - DNA, 25 bp, Homo sapiens
agacgactggggcctccacactaag

SEQ ID NO: 14615 - DNA, 25 bp, Homo sapiens
gacgactggggcctccacactaagg

SEQ ID NO: 14616 - DNA, 25 bp, Homo sapiens
acgactggggcctccacactaagga

SEQ ID NO: 14617 - DNA, 25 bp, Homo sapiens
cgactggggcctccacactaaggag

SEQ ID NO: 14618 - DNA, 25 bp, Homo sapiens
gactggggcctccacactaaggagg

SEQ ID NO: 14619 - DNA, 25 bp, Homo sapiens
actggggcctccacactaaggaggg

SEQ ID NO: 14620 - DNA, 25 bp, Homo sapiens
ctggggcctccacactaaggagggg

SEQ ID NO: 14621 - DNA, 25 bp, Homo sapiens
tggggcctccacactaaggaggggc

SEQ ID NO: 14622 - DNA, 25 bp, Homo sapiens
ggggcctccacactaaggaggggca

SEQ ID NO: 14623 - DNA, 25 bp, Homo sapiens
gggcctccacactaaggaggggcag

SEQ ID NO: 14624 - DNA, 25 bp, Homo sapiens
ggcctccacactaaggaggggcagg

SEQ ID NO: 14625 - DNA, 25 bp, Homo sapiens
gcctccacactaaggaggggcaggg

SEQ ID NO: 14626 - DNA, 25 bp, Homo sapiens
cctccacactaaggaggggcagggc

SEQ ID NO: 14627 - DNA, 25 bp, Homo sapiens
ctccacactaaggaggggcagggct

SEQ ID NO: 14628 - DNA, 25 bp, Homo sapiens
tccacactaaggaggggcagggctg

SEQ ID NO: 14629 - DNA, 25 bp, Homo sapiens
ccacactaaggaggggcagggctgg

SEQ ID NO: 14630 - DNA, 25 bp, Homo sapiens
cacactaaggaggggcagggctggc

SEQ ID NO: 14631 - DNA, 25 bp, Homo sapiens
acactaaggaggggcagggctggca

SEQ ID NO: 14632 - DNA, 25 bp, Homo sapiens
cactaaggaggggcagggctggcag

SEQ ID NO: 14633 - DNA, 25 bp, Homo sapiens
actaaggaggggcagggctggcagt

SEQ ID NO: 14634 - DNA, 25 bp, Homo sapiens
ctaaggaggggcagggctggcagtg

SEQ ID NO: 14635 - DNA, 25 bp, Homo sapiens
taaggaggggcagggctggcagtga

SEQ ID NO: 14636 - DNA, 25 bp, Homo sapiens
aaggaggggcagggctggcagtgac

SEQ ID NO: 14637 - DNA, 25 bp, Homo sapiens
aggaggggcagggctggcagtgacg

SEQ ID NO: 14638 - DNA, 25 bp, Homo sapiens
ggaggggcagggctggcagtgacga

SEQ ID NO: 14639 - DNA, 25 bp, Homo sapiens
gaggggcagggctggcagtgacgag

SEQ ID NO: 14640 - DNA, 25 bp, Homo sapiens
aggggcagggctggcagtgacgagg

SEQ ID NO: 14641 - DNA, 25 bp, Homo sapiens
ggggcagggctggcagtgacgaggg

SEQ ID NO: 14642 - DNA, 25 bp, Homo sapiens
gggcagggctggcagtgacgaggga

SEQ ID NO: 14643 - DNA, 25 bp, Homo sapiens
ggcagggctggcagtgacgagggaa

SEQ ID NO: 14644 - DNA, 25 bp, Homo sapiens
gcagggctggcagtgacgagggaaa

SEQ ID NO: 14645 - DNA, 25 bp, Homo sapiens
cagggctggcagtgacgagggaaac

SEQ ID NO: 14646 - DNA, 25 bp, Homo sapiens
agggctggcagtgacgagggaaacc

SEQ ID NO: 14647 - DNA, 25 bp, Homo sapiens
gggctggcagtgacgagggaaacct

SEQ ID NO: 14648 - DNA, 25 bp, Homo sapiens
ggctggcagtgacgagggaaacctc

SEQ ID NO: 14649 - DNA, 25 bp, Homo sapiens
gctggcagtgacgagggaaacctct

SEQ ID NO: 14650 - DNA, 25 bp, Homo sapiens
ctggcagtgacgagggaaacctctc

SEQ ID NO: 14651 - DNA, 25 bp, Homo sapiens
tggcagtgacgagggaaacctctcg

SEQ ID NO: 14652 - DNA, 25 bp, Homo sapiens
ggcagtgacgagggaaacctctcgc

SEQ ID NO: 14653 - DNA, 25 bp, Homo sapiens
gcagtgacgagggaaacctctcgct

SEQ ID NO: 14654 - DNA, 25 bp, Homo sapiens
cagtgacgagggaaacctctcgctg

SEQ ID NO: 14655 - DNA, 25 bp, Homo sapiens
agtgacgagggaaacctctcgctga

SEQ ID NO: 14656 - DNA, 25 bp, Homo sapiens
gtgacgagggaaacctctcgctgag

SEQ ID NO: 14657 - DNA, 25 bp, Homo sapiens
tgacgagggaaacctctcgctgagg

SEQ ID NO: 14658 - DNA, 25 bp, Homo sapiens
gacgagggaaacctctcgctgaggg

SEQ ID NO: 14659 - DNA, 25 bp, Homo sapiens
acgagggaaacctctcgctgagggt

SEQ ID NO: 14660 - DNA, 25 bp, Homo sapiens
cgagggaaacctctcgctgagggtt

SEQ ID NO: 14661 - DNA, 25 bp, Homo sapiens
gagggaaacctctcgctgagggttg

SEQ ID NO: 14662 - DNA, 25 bp, Homo sapiens
agggaaacctctcgctgagggttgg

SEQ ID NO: 14663 - DNA, 25 bp, Homo sapiens
gggaaacctctcgctgagggttggg

SEQ ID NO: 14664 - DNA, 25 bp, Homo sapiens
ggaaacctctcgctgagggttgggg

SEQ ID NO: 14665 - DNA, 25 bp, Homo sapiens
gaaacctctcgctgagggttggggc

SEQ ID NO: 14666 - DNA, 25 bp, Homo sapiens
aaacctctcgctgagggttggggca

SEQ ID NO: 14667 - DNA, 25 bp, Homo sapiens
aacctctcgctgagggttggggcaa

SEQ ID NO: 14668 - DNA, 25 bp, Homo sapiens
acctctcgctgagggttggggcaaa

SEQ ID NO: 14669 - DNA, 25 bp, Homo sapiens
cctctcgctgagggttggggcaaag

SEQ ID NO: 14670 - DNA, 25 bp, Homo sapiens
ctctcgctgagggttggggcaaagt

SEQ ID NO: 14671 - DNA, 25 bp, Homo sapiens
tctcgctgagggttggggcaaagtc

SEQ ID NO: 14672 - DNA, 25 bp, Homo sapiens
ctcgctgagggttggggcaaagtca

SEQ ID NO: 14673 - DNA, 25 bp, Homo sapiens
tcgctgagggttggggcaaagtcac

SEQ ID NO: 14674 - DNA, 25 bp, Homo sapiens
cgctgagggttggggcaaagtcacc

SEQ ID NO: 14675 - DNA, 25 bp, Homo sapiens
gctgagggttggggcaaagtcaccc

SEQ ID NO: 14676 - DNA, 25 bp, Homo sapiens
ctgagggttggggcaaagtcacccc

SEQ ID NO: 14677 - DNA, 25 bp, Homo sapiens
tgagggttggggcaaagtcacccct

SEQ ID NO: 14678 - DNA, 25 bp, Homo sapiens
gagggttggggcaaagtcacccctg

SEQ ID NO: 14679 - DNA, 25 bp, Homo sapiens
agggttggggcaaagtcacccctgg

SEQ ID NO: 14680 - DNA, 25 bp, Homo sapiens
gggttggggcaaagtcacccctgga

SEQ ID NO: 14681 - DNA, 25 bp, Homo sapiens
ggttggggcaaagtcacccctggaa

SEQ ID NO: 14682 - DNA, 25 bp, Homo sapiens
gttggggcaaagtcacccctggaaa

SEQ ID NO: 14683 - DNA, 25 bp, Homo sapiens
ttggggcaaagtcacccctggaaat

SEQ ID NO: 14684 - DNA, 25 bp, Homo sapiens
tggggcaaagtcacccctggaaatc

SEQ ID NO: 14685 - DNA, 25 bp, Homo sapiens
ggggcaaagtcacccctggaaatcg

SEQ ID NO: 14686 - DNA, 25 bp, Homo sapiens
gggcaaagtcacccctggaaatcga

SEQ ID NO: 14687 - DNA, 25 bp, Homo sapiens
ggcaaagtcacccctggaaatcgaa

SEQ ID NO: 14688 - DNA, 25 bp, Homo sapiens
gcaaagtcacccctggaaatcgaag

SEQ ID NO: 14689 - DNA, 25 bp, Homo sapiens
caaagtcacccctggaaatcgaagg

SEQ ID NO: 14690 - DNA, 25 bp, Homo sapiens
aaagtcacccctggaaatcgaaggg

SEQ ID NO: 14691 - DNA, 25 bp, Homo sapiens
aagtcacccctggaaatcgaagggg

SEQ ID NO: 14692 - DNA, 25 bp, Homo sapiens
agtcacccctggaaatcgaaggggc

SEQ ID NO: 14693 - DNA, 25 bp, Homo sapiens
gtcacccctggaaatcgaaggggcc

SEQ ID NO: 14694 - DNA, 25 bp, Homo sapiens
tcacccctggaaatcgaaggggccg

SEQ ID NO: 14695 - DNA, 25 bp, Homo sapiens
cacccctggaaatcgaaggggccgc

SEQ ID NO: 14696 - DNA, 25 bp, Homo sapiens
acccctggaaatcgaaggggccgct

SEQ ID NO: 14697 - DNA, 25 bp, Homo sapiens
cccctggaaatcgaaggggccgctg

SEQ ID NO: 14698 - DNA, 25 bp, Homo sapiens
ccctggaaatcgaaggggccgctgg

SEQ ID NO: 14699 - DNA, 25 bp, Homo sapiens
cctggaaatcgaaggggccgctggt

SEQ ID NO: 14700 - DNA, 25 bp, Homo sapiens
ctggaaatcgaaggggccgctggtg

SEQ ID NO: 14701 - DNA, 25 bp, Homo sapiens
tggaaatcgaaggggccgctggtgg

SEQ ID NO: 14702 - DNA, 25 bp, Homo sapiens
ggaaatcgaaggggccgctggtggt

SEQ ID NO: 14703 - DNA, 25 bp, Homo sapiens
gaaatcgaaggggccgctggtggtc

SEQ ID NO: 14704 - DNA, 25 bp, Homo sapiens
aaatcgaaggggccgctggtggtct

SEQ ID NO: 14705 - DNA, 25 bp, Homo sapiens
aatcgaaggggccgctggtggtctc

SEQ ID NO: 14706 - DNA, 25 bp, Homo sapiens
atcgaaggggccgctggtggtctct

SEQ ID NO: 14707 - DNA, 25 bp, Homo sapiens
tcgaaggggccgctggtggtctctt

SEQ ID NO: 14708 - DNA, 25 bp, Homo sapiens
cgaaggggccgctggtggtctcttg

SEQ ID NO: 14709 - DNA, 25 bp, Homo sapiens
gaaggggccgctggtggtctcttga

SEQ ID NO: 14710 - DNA, 25 bp, Homo sapiens
aaggggccgctggtggtctcttgag

SEQ ID NO: 14711 - DNA, 25 bp, Homo sapiens
aggggccgctggtggtctcttgagg

SEQ ID NO: 14712 - DNA, 25 bp, Homo sapiens
ggggccgctggtggtctcttgaggt

SEQ ID NO: 14713 - DNA, 25 bp, Homo sapiens
gggccgctggtggtctcttgaggtc

SEQ ID NO: 14714 - DNA, 25 bp, Homo sapiens
ggccgctggtggtctcttgaggtcc

SEQ ID NO: 14715 - DNA, 25 bp, Homo sapiens
gccgctggtggtctcttgaggtcca

SEQ ID NO: 14716 - DNA, 25 bp, Homo sapiens
ccgctggtggtctcttgaggtccac

SEQ ID NO: 14717 - DNA, 25 bp, Homo sapiens
cgctggtggtctcttgaggtccacc

SEQ ID NO: 14718 - DNA, 25 bp, Homo sapiens
gctggtggtctcttgaggtccacca

SEQ ID NO: 14719 - DNA, 25 bp, Homo sapiens
ctggtggtctcttgaggtccaccag

SEQ ID NO: 14720 - DNA, 25 bp, Homo sapiens
tggtggtctcttgaggtccaccagc

SEQ ID NO: 14721 - DNA, 25 bp, Homo sapiens
ggtggtctcttgaggtccaccagcc

SEQ ID NO: 14722 - DNA, 25 bp, Homo sapiens
gtggtctcttgaggtccaccagcct

SEQ ID NO: 14723 - DNA, 25 bp, Homo sapiens
tggtctcttgaggtccaccagcctc

SEQ ID NO: 14724 - DNA, 25 bp, Homo sapiens
ggtctcttgaggtccaccagcctca

SEQ ID NO: 14725 - DNA, 25 bp, Homo sapiens
gtctcttgaggtccaccagcctcaa

SEQ ID NO: 14726 - DNA, 25 bp, Homo sapiens
tctcttgaggtccaccagcctcaaa

SEQ ID NO: 14727 - DNA, 25 bp, Homo sapiens
ctcttgaggtccaccagcctcaaat

SEQ ID NO: 14728 - DNA, 25 bp, Homo sapiens
tcttgaggtccaccagcctcaaatg

SEQ ID NO: 14729 - DNA, 25 bp, Homo sapiens
cttgaggtccaccagcctcaaatgc

SEQ ID NO: 14730 - DNA, 25 bp, Homo sapiens
ttgaggtccaccagcctcaaatgca

SEQ ID NO: 14731 - DNA, 25 bp, Homo sapiens
tgaggtccaccagcctcaaatgcat

SEQ ID NO: 14732 - DNA, 25 bp, Homo sapiens
gaggtccaccagcctcaaatgcatc

SEQ ID NO: 14733 - DNA, 25 bp, Homo sapiens
aggtccaccagcctcaaatgcatct

SEQ ID NO: 14734 - DNA, 25 bp, Homo sapiens
ggtccaccagcctcaaatgcatctc

SEQ ID NO: 14735 - DNA, 25 bp, Homo sapiens
gtccaccagcctcaaatgcatctct

SEQ ID NO: 14736 - DNA, 25 bp, Homo sapiens
tccaccagcctcaaatgcatctctt

SEQ ID NO: 14737 - DNA, 25 bp, Homo sapiens
ccaccagcctcaaatgcatctcttc

SEQ ID NO: 14738 - DNA, 25 bp, Homo sapiens
caccagcctcaaatgcatctcttca

SEQ ID NO: 14739 - DNA, 25 bp, Homo sapiens
accagcctcaaatgcatctcttcag

SEQ ID NO: 14740 - DNA, 25 bp, Homo sapiens
ccagcctcaaatgcatctcttcaga

SEQ ID NO: 14741 - DNA, 25 bp, Homo sapiens
cagcctcaaatgcatctcttcagac

SEQ ID NO: 14742 - DNA, 25 bp, Homo sapiens
agcctcaaatgcatctcttcagacg

SEQ ID NO: 14743 - DNA, 25 bp, Homo sapiens
gcctcaaatgcatctcttcagacgg

SEQ ID NO: 14744 - DNA, 25 bp, Homo sapiens
cctcaaatgcatctcttcagacggt

SEQ ID NO: 14745 - DNA, 25 bp, Homo sapiens
ctcaaatgcatctcttcagacggtg

SEQ ID NO: 14746 - DNA, 25 bp, Homo sapiens
tcaaatgcatctcttcagacggtgt

SEQ ID NO: 14747 - DNA, 25 bp, Homo sapiens
caaatgcatctcttcagacggtgtt

SEQ ID NO: 14748 - DNA, 25 bp, Homo sapiens
aaatgcatctcttcagacggtgttg

SEQ ID NO: 14749 - DNA, 25 bp, Homo sapiens
aatgcatctcttcagacggtgttgg

SEQ ID NO: 14750 - DNA, 25 bp, Homo sapiens
atgcatctcttcagacggtgttggg

SEQ ID NO: 14751 - DNA, 25 bp, Homo sapiens
tgcatctcttcagacggtgttgggg

SEQ ID NO: 14752 - DNA, 25 bp, Homo sapiens
gcatctcttcagacggtgttggggg

SEQ ID NO: 14753 - DNA, 25 bp, Homo sapiens
catctcttcagacggtgttgggggc

SEQ ID NO: 14754 - DNA, 25 bp, Homo sapiens
atctcttcagacggtgttgggggca

SEQ ID NO: 14755 - DNA, 25 bp, Homo sapiens
tctcttcagacggtgttgggggcac

SEQ ID NO: 14756 - DNA, 25 bp, Homo sapiens
ctcttcagacggtgttgggggcaca

SEQ ID NO: 14757 - DNA, 25 bp, Homo sapiens
tcttcagacggtgttgggggcacaa

SEQ ID NO: 14758 - DNA, 25 bp, Homo sapiens
cttcagacggtgttgggggcacaac

SEQ ID NO: 14759 - DNA, 25 bp, Homo sapiens
ttcagacggtgttgggggcacaacc

SEQ ID NO: 14760 - DNA, 25 bp, Homo sapiens
tcagacggtgttgggggcacaaccc

SEQ ID NO: 14761 - DNA, 25 bp, Homo sapiens
cagacggtgttgggggcacaaccct

SEQ ID NO: 14762 - DNA, 25 bp, Homo sapiens
agacggtgttgggggcacaacccta

SEQ ID NO: 14763 - DNA, 25 bp, Homo sapiens
gacggtgttgggggcacaaccctac

SEQ ID NO: 14764 - DNA, 25 bp, Homo sapiens
acggtgttgggggcacaaccctact

SEQ ID NO: 14765 - DNA, 25 bp, Homo sapiens
cggtgttgggggcacaaccctactc

SEQ ID NO: 14766 - DNA, 25 bp, Homo sapiens
ggtgttgggggcacaaccctactcc

SEQ ID NO: 14767 - DNA, 25 bp, Homo sapiens
gtgttgggggcacaaccctactccc

SEQ ID NO: 14768 - DNA, 25 bp, Homo sapiens
tgttgggggcacaaccctactcccc

SEQ ID NO: 14769 - DNA, 25 bp, Homo sapiens
gttgggggcacaaccctactccccg

SEQ ID NO: 14770 - DNA, 25 bp, Homo sapiens
ttgggggcacaaccctactccccga

SEQ ID NO: 14771 - DNA, 25 bp, Homo sapiens
tgggggcacaaccctactccccgaa

SEQ ID NO: 14772 - DNA, 25 bp, Homo sapiens
gggggcacaaccctactccccgaaa

SEQ ID NO: 14773 - DNA, 25 bp, Homo sapiens
ggggcacaaccctactccccgaaaa

SEQ ID NO: 14774 - DNA, 25 bp, Homo sapiens
gggcacaaccctactccccgaaaag

SEQ ID NO: 14775 - DNA, 25 bp, Homo sapiens
ggcacaaccctactccccgaaaagt

SEQ ID NO: 14776 - DNA, 25 bp, Homo sapiens
gcacaaccctactccccgaaaagtc

SEQ ID NO: 14777 - DNA, 25 bp, Homo sapiens
cacaaccctactccccgaaaagtcg

SEQ ID NO: 14778 - DNA, 25 bp, Homo sapiens
acaaccctactccccgaaaagtcga

SEQ ID NO: 14779 - DNA, 25 bp, Homo sapiens
caaccctactccccgaaaagtcgaa

SEQ ID NO: 14780 - DNA, 25 bp, Homo sapiens
aaccctactccccgaaaagtcgaaa

SEQ ID NO: 14781 - DNA, 25 bp, Homo sapiens
accctactccccgaaaagtcgaaaa

SEQ ID NO: 14782 - DNA, 25 bp, Homo sapiens
ccctactccccgaaaagtcgaaaac

SEQ ID NO: 14783 - DNA, 25 bp, Homo sapiens
cctactccccgaaaagtcgaaaacc

SEQ ID NO: 14784 - DNA, 25 bp, Homo sapiens
ctactccccgaaaagtcgaaaaccc

SEQ ID NO: 14785 - DNA, 25 bp, Homo sapiens
tactccccgaaaagtcgaaaaccca

SEQ ID NO: 14786 - DNA, 25 bp, Homo sapiens
actccccgaaaagtcgaaaacccaa

SEQ ID NO: 14787 - DNA, 25 bp, Homo sapiens
ctccccgaaaagtcgaaaacccaat

SEQ ID NO: 14788 - DNA, 25 bp, Homo sapiens
tccccgaaaagtcgaaaacccaatt

SEQ ID NO: 14789 - DNA, 25 bp, Homo sapiens
ccccgaaaagtcgaaaacccaattc

SEQ ID NO: 14790 - DNA, 25 bp, Homo sapiens
cccgaaaagtcgaaaacccaattca

SEQ ID NO: 14791 - DNA, 25 bp, Homo sapiens
ccgaaaagtcgaaaacccaattcag

SEQ ID NO: 14792 - DNA, 25 bp, Homo sapiens
cgaaaagtcgaaaacccaattcagt

SEQ ID NO: 14793 - DNA, 25 bp, Homo sapiens
gaaaagtcgaaaacccaattcagtt

SEQ ID NO: 14794 - DNA, 25 bp, Homo sapiens
aaaagtcgaaaacccaattcagttc

SEQ ID NO: 14795 - DNA, 25 bp, Homo sapiens
aaagtcgaaaacccaattcagttcc

SEQ ID NO: 14796 - DNA, 25 bp, Homo sapiens
aagtcgaaaacccaattcagttcct

SEQ ID NO: 14797 - DNA, 25 bp, Homo sapiens
agtcgaaaacccaattcagttcctg

SEQ ID NO: 14798 - DNA, 25 bp, Homo sapiens
gtcgaaaacccaattcagttcctgc

SEQ ID NO: 14799 - DNA, 25 bp, Homo sapiens
tcgaaaacccaattcagttcctgcg

SEQ ID NO: 14800 - DNA, 25 bp, Homo sapiens
cgaaaacccaattcagttcctgcga

SEQ ID NO: 14801 - DNA, 25 bp, Homo sapiens
gaaaacccaattcagttcctgcgag

SEQ ID NO: 14802 - DNA, 25 bp, Homo sapiens
aaaacccaattcagttcctgcgagt

SEQ ID NO: 14803 - DNA, 25 bp, Homo sapiens
aaacccaattcagttcctgcgagtc

SEQ ID NO: 14804 - DNA, 25 bp, Homo sapiens
aacccaattcagttcctgcgagtcc

SEQ ID NO: 14805 - DNA, 25 bp, Homo sapiens
acccaattcagttcctgcgagtccc

SEQ ID NO: 14806 - DNA, 25 bp, Homo sapiens
cccaattcagttcctgcgagtccct

SEQ ID NO: 14807 - DNA, 25 bp, Homo sapiens
ccaattcagttcctgcgagtccctc

SEQ ID NO: 14808 - DNA, 25 bp, Homo sapiens
caattcagttcctgcgagtccctct

SEQ ID NO: 14809 - DNA, 25 bp, Homo sapiens
aattcagttcctgcgagtccctctt

SEQ ID NO: 14810 - DNA, 25 bp, Homo sapiens
attcagttcctgcgagtccctctta

SEQ ID NO: 14811 - DNA, 25 bp, Homo sapiens
ttcagttcctgcgagtccctcttag

SEQ ID NO: 14812 - DNA, 25 bp, Homo sapiens
tcagttcctgcgagtccctcttaga

SEQ ID NO: 14813 - DNA, 25 bp, Homo sapiens
cagttcctgcgagtccctcttagaa

SEQ ID NO: 14814 - DNA, 25 bp, Homo sapiens
agttcctgcgagtccctcttagaat

SEQ ID NO: 14815 - DNA, 25 bp, Homo sapiens
gttcctgcgagtccctcttagaatc

SEQ ID NO: 14816 - DNA, 25 bp, Homo sapiens
ttcctgcgagtccctcttagaatcc

SEQ ID NO: 14817 - DNA, 25 bp, Homo sapiens
tcctgcgagtccctcttagaatcca

SEQ ID NO: 14818 - DNA, 25 bp, Homo sapiens
cctgcgagtccctcttagaatccag

SEQ ID NO: 14819 - DNA, 25 bp, Homo sapiens
ctgcgagtccctcttagaatccaga

SEQ ID NO: 14820 - DNA, 25 bp, Homo sapiens
tgcgagtccctcttagaatccagac

SEQ ID NO: 14821 - DNA, 25 bp, Homo sapiens
gcgagtccctcttagaatccagacc

SEQ ID NO: 14822 - DNA, 25 bp, Homo sapiens
cgagtccctcttagaatccagaccg

SEQ ID NO: 14823 - DNA, 25 bp, Homo sapiens
gagtccctcttagaatccagaccga

SEQ ID NO: 14824 - DNA, 25 bp, Homo sapiens
agtccctcttagaatccagaccgag

SEQ ID NO: 14825 - DNA, 25 bp, Homo sapiens
gtccctcttagaatccagaccgagc

SEQ ID NO: 14826 - DNA, 25 bp, Homo sapiens
tccctcttagaatccagaccgagca

SEQ ID NO: 14827 - DNA, 25 bp, Homo sapiens
ccctcttagaatccagaccgagcat

SEQ ID NO: 14828 - DNA, 25 bp, Homo sapiens
cctcttagaatccagaccgagcatg

SEQ ID NO: 14829 - DNA, 25 bp, Homo sapiens
ctcttagaatccagaccgagcatgg

SEQ ID NO: 14830 - DNA, 25 bp, Homo sapiens
tcttagaatccagaccgagcatggg

SEQ ID NO: 14831 - DNA, 25 bp, Homo sapiens
cttagaatccagaccgagcatgggg

SEQ ID NO: 14832 - DNA, 25 bp, Homo sapiens
ttagaatccagaccgagcatgggga

SEQ ID NO: 14833 - DNA, 25 bp, Homo sapiens
tagaatccagaccgagcatggggag

SEQ ID NO: 14834 - DNA, 25 bp, Homo sapiens
agaatccagaccgagcatggggaga

SEQ ID NO: 14835 - DNA, 25 bp, Homo sapiens
gaatccagaccgagcatggggagaa

SEQ ID NO: 14836 - DNA, 25 bp, Homo sapiens
aatccagaccgagcatggggagaaa

SEQ ID NO: 14837 - DNA, 25 bp, Homo sapiens
atccagaccgagcatggggagaaaa

SEQ ID NO: 14838 - DNA, 25 bp, Homo sapiens
tccagaccgagcatggggagaaaac

SEQ ID NO: 14839 - DNA, 25 bp, Homo sapiens
ccagaccgagcatggggagaaaact

SEQ ID NO: 14840 - DNA, 25 bp, Homo sapiens
cagaccgagcatggggagaaaactg

SEQ ID NO: 14841 - DNA, 25 bp, Homo sapiens
agaccgagcatggggagaaaactga

SEQ ID NO: 14842 - DNA, 25 bp, Homo sapiens
gaccgagcatggggagaaaactgag

SEQ ID NO: 14843 - DNA, 25 bp, Homo sapiens
accgagcatggggagaaaactgagc

SEQ ID NO: 14844 - DNA, 25 bp, Homo sapiens
ccgagcatggggagaaaactgagct

SEQ ID NO: 14845 - DNA, 25 bp, Homo sapiens
cgagcatggggagaaaactgagctc

SEQ ID NO: 14846 - DNA, 25 bp, Homo sapiens
gagcatggggagaaaactgagctct

SEQ ID NO: 14847 - DNA, 25 bp, Homo sapiens
agcatggggagaaaactgagctctc

SEQ ID NO: 14848 - DNA, 25 bp, Homo sapiens
gcatggggagaaaactgagctctcc

SEQ ID NO: 14849 - DNA, 25 bp, Homo sapiens
catggggagaaaactgagctctccg

SEQ ID NO: 14850 - DNA, 25 bp, Homo sapiens
atggggagaaaactgagctctccga

SEQ ID NO: 14851 - DNA, 25 bp, Homo sapiens
tggggagaaaactgagctctccgac

SEQ ID NO: 14852 - DNA, 25 bp, Homo sapiens
ggggagaaaactgagctctccgacc

SEQ ID NO: 14853 - DNA, 25 bp, Homo sapiens
gggagaaaactgagctctccgacca

SEQ ID NO: 14854 - DNA, 25 bp, Homo sapiens
ggagaaaactgagctctccgaccac

SEQ ID NO: 14855 - DNA, 25 bp, Homo sapiens
gagaaaactgagctctccgaccaca

SEQ ID NO: 14856 - DNA, 25 bp, Homo sapiens
agaaaactgagctctccgaccacac

SEQ ID NO: 14857 - DNA, 25 bp, Homo sapiens
gaaaactgagctctccgaccacacc

SEQ ID NO: 14858 - DNA, 25 bp, Homo sapiens
aaaactgagctctccgaccacaccc

SEQ ID NO: 14859 - DNA, 25 bp, Homo sapiens
aaactgagctctccgaccacaccca

SEQ ID NO: 14860 - DNA, 25 bp, Homo sapiens
aactgagctctccgaccacacccag

SEQ ID NO: 14861 - DNA, 25 bp, Homo sapiens
actgagctctccgaccacacccagg

SEQ ID NO: 14862 - DNA, 25 bp, Homo sapiens
ctgagctctccgaccacacccaggg

SEQ ID NO: 14863 - DNA, 25 bp, Homo sapiens
tgagctctccgaccacacccaggga

SEQ ID NO: 14864 - DNA, 25 bp, Homo sapiens
gagctctccgaccacacccagggac

SEQ ID NO: 14865 - DNA, 25 bp, Homo sapiens
agctctccgaccacacccagggaca

SEQ ID NO: 14866 - DNA, 25 bp, Homo sapiens
gctctccgaccacacccagggacat

SEQ ID NO: 14867 - DNA, 25 bp, Homo sapiens
ctctccgaccacacccagggacatg

SEQ ID NO: 14868 - DNA, 25 bp, Homo sapiens
tctccgaccacacccagggacatgc

SEQ ID NO: 14869 - DNA, 25 bp, Homo sapiens
ctccgaccacacccagggacatgct

SEQ ID NO: 14870 - DNA, 25 bp, Homo sapiens
tccgaccacacccagggacatgctg

SEQ ID NO: 14871 - DNA, 25 bp, Homo sapiens
ccgaccacacccagggacatgctgt

SEQ ID NO: 14872 - DNA, 25 bp, Homo sapiens
cgaccacacccagggacatgctgtt

SEQ ID NO: 14873 - DNA, 25 bp, Homo sapiens
gaccacacccagggacatgctgttg

SEQ ID NO: 14874 - DNA, 25 bp, Homo sapiens
accacacccagggacatgctgttgt

SEQ ID NO: 14875 - DNA, 25 bp, Homo sapiens
ccacacccagggacatgctgttgtc

SEQ ID NO: 14876 - DNA, 25 bp, Homo sapiens
cacacccagggacatgctgttgtcg

SEQ ID NO: 14877 - DNA, 25 bp, Homo sapiens
acacccagggacatgctgttgtcgc

SEQ ID NO: 14878 - DNA, 25 bp, Homo sapiens
cacccagggacatgctgttgtcgcc

SEQ ID NO: 14879 - DNA, 25 bp, Homo sapiens
acccagggacatgctgttgtcgccc

SEQ ID NO: 14880 - DNA, 25 bp, Homo sapiens
cccagggacatgctgttgtcgccca

SEQ ID NO: 14881 - DNA, 25 bp, Homo sapiens
ccagggacatgctgttgtcgcccac

SEQ ID NO: 14882 - DNA, 25 bp, Homo sapiens
cagggacatgctgttgtcgcccaca

SEQ ID NO: 14883 - DNA, 25 bp, Homo sapiens
agggacatgctgttgtcgcccacac

SEQ ID NO: 14884 - DNA, 25 bp, Homo sapiens
gggacatgctgttgtcgcccacact

SEQ ID NO: 14885 - DNA, 25 bp, Homo sapiens
ggacatgctgttgtcgcccacactg

SEQ ID NO: 14886 - DNA, 25 bp, Homo sapiens
gacatgctgttgtcgcccacactgc

SEQ ID NO: 14887 - DNA, 25 bp, Homo sapiens
acatgctgttgtcgcccacactgcg

SEQ ID NO: 14888 - DNA, 25 bp, Homo sapiens
catgctgttgtcgcccacactgcgt

SEQ ID NO: 14889 - DNA, 25 bp, Homo sapiens
atgctgttgtcgcccacactgcgtc

SEQ ID NO: 14890 - DNA, 25 bp, Homo sapiens
tgctgttgtcgcccacactgcgtcc

SEQ ID NO: 14891 - DNA, 25 bp, Homo sapiens
gctgttgtcgcccacactgcgtcct

SEQ ID NO: 14892 - DNA, 25 bp, Homo sapiens
ctgttgtcgcccacactgcgtcctc

SEQ ID NO: 14893 - DNA, 25 bp, Homo sapiens
tgttgtcgcccacactgcgtcctcg

SEQ ID NO: 14894 - DNA, 25 bp, Homo sapiens
gttgtcgcccacactgcgtcctcgg

SEQ ID NO: 14895 - DNA, 25 bp, Homo sapiens
ttgtcgcccacactgcgtcctcgga

SEQ ID NO: 14896 - DNA, 25 bp, Homo sapiens
tgtcgcccacactgcgtcctcggag

SEQ ID NO: 14897 - DNA, 25 bp, Homo sapiens
gtcgcccacactgcgtcctcggagg

SEQ ID NO: 14898 - DNA, 25 bp, Homo sapiens
tcgcccacactgcgtcctcggaggc

SEQ ID NO: 14899 - DNA, 25 bp, Homo sapiens
cgcccacactgcgtcctcggaggcg

SEQ ID NO: 14900 - DNA, 25 bp, Homo sapiens
gcccacactgcgtcctcggaggcgg

SEQ ID NO: 14901 - DNA, 25 bp, Homo sapiens
cccacactgcgtcctcggaggcggt

SEQ ID NO: 14902 - DNA, 25 bp, Homo sapiens
ccacactgcgtcctcggaggcggtg

SEQ ID NO: 14903 - DNA, 25 bp, Homo sapiens
cacactgcgtcctcggaggcggtgt

SEQ ID NO: 14904 - DNA, 25 bp, Homo sapiens
acactgcgtcctcggaggcggtgtc

SEQ ID NO: 14905 - DNA, 25 bp, Homo sapiens
cactgcgtcctcggaggcggtgtct

SEQ ID NO: 14906 - DNA, 25 bp, Homo sapiens
actgcgtcctcggaggcggtgtctg

SEQ ID NO: 14907 - DNA, 25 bp, Homo sapiens
ctgcgtcctcggaggcggtgtctgg

SEQ ID NO: 14908 - DNA, 25 bp, Homo sapiens
tgcgtcctcggaggcggtgtctgga

SEQ ID NO: 14909 - DNA, 25 bp, Homo sapiens
gcgtcctcggaggcggtgtctggag

SEQ ID NO: 14910 - DNA, 25 bp, Homo sapiens
cgtcctcggaggcggtgtctggagt

SEQ ID NO: 14911 - DNA, 25 bp, Homo sapiens
gtcctcggaggcggtgtctggagtc

SEQ ID NO: 14912 - DNA, 25 bp, Homo sapiens
tcctcggaggcggtgtctggagtcc

SEQ ID NO: 14913 - DNA, 25 bp, Homo sapiens
cctcggaggcggtgtctggagtcct

SEQ ID NO: 14914 - DNA, 25 bp, Homo sapiens
ctcggaggcggtgtctggagtcctc

SEQ ID NO: 14915 - DNA, 25 bp, Homo sapiens
tcggaggcggtgtctggagtcctct

SEQ ID NO: 14916 - DNA, 25 bp, Homo sapiens
cggaggcggtgtctggagtcctctg

SEQ ID NO: 14917 - DNA, 25 bp, Homo sapiens
ggaggcggtgtctggagtcctctgt

SEQ ID NO: 14918 - DNA, 25 bp, Homo sapiens
gaggcggtgtctggagtcctctgtg

SEQ ID NO: 14919 - DNA, 25 bp, Homo sapiens
aggcggtgtctggagtcctctgtgg

SEQ ID NO: 14920 - DNA, 25 bp, Homo sapiens
ggcggtgtctggagtcctctgtgga

SEQ ID NO: 14921 - DNA, 25 bp, Homo sapiens
gcggtgtctggagtcctctgtggac

SEQ ID NO: 14922 - DNA, 25 bp, Homo sapiens
cggtgtctggagtcctctgtggacg

SEQ ID NO: 14923 - DNA, 25 bp, Homo sapiens
ggtgtctggagtcctctgtggacga

SEQ ID NO: 14924 - DNA, 25 bp, Homo sapiens
gtgtctggagtcctctgtggacgat

SEQ ID NO: 14925 - DNA, 25 bp, Homo sapiens
tgtctggagtcctctgtggacgatg

SEQ ID NO: 14926 - DNA, 25 bp, Homo sapiens
gtctggagtcctctgtggacgatgc

SEQ ID NO: 14927 - DNA, 25 bp, Homo sapiens
tctggagtcctctgtggacgatgcg

SEQ ID NO: 14928 - DNA, 25 bp, Homo sapiens
ctggagtcctctgtggacgatgcgg

SEQ ID NO: 14929 - DNA, 25 bp, Homo sapiens
tggagtcctctgtggacgatgcggg

SEQ ID NO: 14930 - DNA, 25 bp, Homo sapiens
ggagtcctctgtggacgatgcgggc

SEQ ID NO: 14931 - DNA, 25 bp, Homo sapiens
gagtcctctgtggacgatgcgggct

SEQ ID NO: 14932 - DNA, 25 bp, Homo sapiens
agtcctctgtggacgatgcgggctg

SEQ ID NO: 14933 - DNA, 25 bp, Homo sapiens
gtcctctgtggacgatgcgggctgt

SEQ ID NO: 14934 - DNA, 25 bp, Homo sapiens
tcctctgtggacgatgcgggctgtc

SEQ ID NO: 14935 - DNA, 25 bp, Homo sapiens
cctctgtggacgatgcgggctgtcc

SEQ ID NO: 14936 - DNA, 25 bp, Homo sapiens
ctctgtggacgatgcgggctgtcca

SEQ ID NO: 14937 - DNA, 25 bp, Homo sapiens
tctgtggacgatgcgggctgtccag

SEQ ID NO: 14938 - DNA, 25 bp, Homo sapiens
ctgtggacgatgcgggctgtccaga

SEQ ID NO: 14939 - DNA, 25 bp, Homo sapiens
tgtggacgatgcgggctgtccagac

SEQ ID NO: 14940 - DNA, 25 bp, Homo sapiens
gtggacgatgcgggctgtccagacc

SEQ ID NO: 14941 - DNA, 25 bp, Homo sapiens
tggacgatgcgggctgtccagacct

SEQ ID NO: 14942 - DNA, 25 bp, Homo sapiens
ggacgatgcgggctgtccagacctt

SEQ ID NO: 14943 - DNA, 25 bp, Homo sapiens
gacgatgcgggctgtccagaccttg

SEQ ID NO: 14944 - DNA, 25 bp, Homo sapiens
acgatgcgggctgtccagaccttgg

SEQ ID NO: 14945 - DNA, 25 bp, Homo sapiens
cgatgcgggctgtccagaccttgga

SEQ ID NO: 14946 - DNA, 25 bp, Homo sapiens
gatgcgggctgtccagaccttggaa

SEQ ID NO: 14947 - DNA, 25 bp, Homo sapiens
atgcgggctgtccagaccttggaaa

SEQ ID NO: 14948 - DNA, 25 bp, Homo sapiens
tgcgggctgtccagaccttggaaag

SEQ ID NO: 14949 - DNA, 25 bp, Homo sapiens
gcgggctgtccagaccttggaaagg

SEQ ID NO: 14950 - DNA, 25 bp, Homo sapiens
cgggctgtccagaccttggaaagga

SEQ ID NO: 14951 - DNA, 25 bp, Homo sapiens
gggctgtccagaccttggaaaggag

SEQ ID NO: 14952 - DNA, 25 bp, Homo sapiens
ggctgtccagaccttggaaaggagc

SEQ ID NO: 14953 - DNA, 25 bp, Homo sapiens
gctgtccagaccttggaaaggagcc

SEQ ID NO: 14954 - DNA, 25 bp, Homo sapiens
ctgtccagaccttggaaaggagccg

SEQ ID NO: 14955 - DNA, 25 bp, Homo sapiens
tgtccagaccttggaaaggagccgc

SEQ ID NO: 14956 - DNA, 25 bp, Homo sapiens
gtccagaccttggaaaggagccgct

SEQ ID NO: 14957 - DNA, 25 bp, Homo sapiens
tccagaccttggaaaggagccgctt

SEQ ID NO: 14958 - DNA, 25 bp, Homo sapiens
ccagaccttggaaaggagccgcttg

SEQ ID NO: 14959 - DNA, 25 bp, Homo sapiens
cagaccttggaaaggagccgcttgt

SEQ ID NO: 14960 - DNA, 25 bp, Homo sapiens
agaccttggaaaggagccgcttgtt

SEQ ID NO: 14961 - DNA, 25 bp, Homo sapiens
gaccttggaaaggagccgcttgttt

SEQ ID NO: 14962 - DNA, 25 bp, Homo sapiens
accttggaaaggagccgcttgtttt

SEQ ID NO: 14963 - DNA, 25 bp, Homo sapiens
ccttggaaaggagccgcttgttttc

SEQ ID NO: 14964 - DNA, 25 bp, Homo sapiens
cttggaaaggagccgcttgttttcc

SEQ ID NO: 14965 - DNA, 25 bp, Homo sapiens
ttggaaaggagccgcttgttttcca

SEQ ID NO: 14966 - DNA, 25 bp, Homo sapiens
tggaaaggagccgcttgttttccag

SEQ ID NO: 14967 - DNA, 25 bp, Homo sapiens
ggaaaggagccgcttgttttccaga

SEQ ID NO: 14968 - DNA, 25 bp, Homo sapiens
gaaaggagccgcttgttttccagaa

SEQ ID NO: 14969 - DNA, 25 bp, Homo sapiens
aaaggagccgcttgttttccagaac

SEQ ID NO: 14970 - DNA, 25 bp, Homo sapiens
aaggagccgcttgttttccagaacc

SEQ ID NO: 14971 - DNA, 25 bp, Homo sapiens
aggagccgcttgttttccagaaccg

SEQ ID NO: 14972 - DNA, 25 bp, Homo sapiens
ggagccgcttgttttccagaaccgc

SEQ ID NO: 14973 - DNA, 25 bp, Homo sapiens
gagccgcttgttttccagaaccgcc

SEQ ID NO: 14974 - DNA, 25 bp, Homo sapiens
agccgcttgttttccagaaccgcca

SEQ ID NO: 14975 - DNA, 25 bp, Homo sapiens
gccgcttgttttccagaaccgccag

SEQ ID NO: 14976 - DNA, 25 bp, Homo sapiens
ccgcttgttttccagaaccgccagt

SEQ ID NO: 14977 - DNA, 25 bp, Homo sapiens
cgcttgttttccagaaccgccagtt

SEQ ID NO: 14978 - DNA, 25 bp, Homo sapiens
gcttgttttccagaaccgccagttt

SEQ ID NO: 14979 - DNA, 25 bp, Homo sapiens
cttgttttccagaaccgccagtttg

SEQ ID NO: 14980 - DNA, 25 bp, Homo sapiens
ttgttttccagaaccgccagtttgc

SEQ ID NO: 14981 - DNA, 25 bp, Homo sapiens
tgttttccagaaccgccagtttgcc

SEQ ID NO: 14982 - DNA, 25 bp, Homo sapiens
gttttccagaaccgccagtttgccc

SEQ ID NO: 14983 - DNA, 25 bp, Homo sapiens
ttttccagaaccgccagtttgccca

SEQ ID NO: 14984 - DNA, 25 bp, Homo sapiens
tttccagaaccgccagtttgcccac

SEQ ID NO: 14985 - DNA, 25 bp, Homo sapiens
ttccagaaccgccagtttgcccacc

SEQ ID NO: 14986 - DNA, 25 bp, Homo sapiens
tccagaaccgccagtttgcccacct

SEQ ID NO: 14987 - DNA, 25 bp, Homo sapiens
ccagaaccgccagtttgcccacctg

SEQ ID NO: 14988 - DNA, 25 bp, Homo sapiens
cagaaccgccagtttgcccacctga

SEQ ID NO: 14989 - DNA, 25 bp, Homo sapiens
agaaccgccagtttgcccacctgat

SEQ ID NO: 14990 - DNA, 25 bp, Homo sapiens
gaaccgccagtttgcccacctgatg

SEQ ID NO: 14991 - DNA, 25 bp, Homo sapiens
aaccgccagtttgcccacctgatgg

SEQ ID NO: 14992 - DNA, 25 bp, Homo sapiens
accgccagtttgcccacctgatgga

SEQ ID NO: 14993 - DNA, 25 bp, Homo sapiens
ccgccagtttgcccacctgatggag

SEQ ID NO: 14994 - DNA, 25 bp, Homo sapiens
cgccagtttgcccacctgatggagg

SEQ ID NO: 14995 - DNA, 25 bp, Homo sapiens
gccagtttgcccacctgatggagga

SEQ ID NO: 14996 - DNA, 25 bp, Homo sapiens
ccagtttgcccacctgatggaggaa

SEQ ID NO: 14997 - DNA, 25 bp, Homo sapiens
cagtttgcccacctgatggaggaac

SEQ ID NO: 14998 - DNA, 25 bp, Homo sapiens
agtttgcccacctgatggaggaacc

SEQ ID NO: 14999 - DNA, 25 bp, Homo sapiens
gtttgcccacctgatggaggaacct

SEQ ID NO: 15000 - DNA, 25 bp, Homo sapiens
tttgcccacctgatggaggaacctc

SEQ ID NO: 15001 - DNA, 25 bp, Homo sapiens
ttgcccacctgatggaggaacctct

SEQ ID NO: 15002 - DNA, 25 bp, Homo sapiens
tgcccacctgatggaggaacctcta

SEQ ID NO: 15003 - DNA, 25 bp, Homo sapiens
gcccacctgatggaggaacctctag

SEQ ID NO: 15004 - DNA, 25 bp, Homo sapiens
cccacctgatggaggaacctctagg

SEQ ID NO: 15005 - DNA, 25 bp, Homo sapiens
ccacctgatggaggaacctctaggc

SEQ ID NO: 15006 - DNA, 25 bp, Homo sapiens
cacctgatggaggaacctctaggca

SEQ ID NO: 15007 - DNA, 25 bp, Homo sapiens
acctgatggaggaacctctaggcag

SEQ ID NO: 15008 - DNA, 25 bp, Homo sapiens
cctgatggaggaacctctaggcagt

SEQ ID NO: 15009 - DNA, 25 bp, Homo sapiens
ctgatggaggaacctctaggcagtg

SEQ ID NO: 15010 - DNA, 25 bp, Homo sapiens
tgatggaggaacctctaggcagtga

SEQ ID NO: 15011 - DNA, 25 bp, Homo sapiens
gatggaggaacctctaggcagtgac

SEQ ID NO: 15012 - DNA, 25 bp, Homo sapiens
atggaggaacctctaggcagtgacc

SEQ ID NO: 15013 - DNA, 25 bp, Homo sapiens
tggaggaacctctaggcagtgaccc

SEQ ID NO: 15014 - DNA, 25 bp, Homo sapiens
ggaggaacctctaggcagtgaccca

SEQ ID NO: 15015 - DNA, 25 bp, Homo sapiens
gaggaacctctaggcagtgacccat

SEQ ID NO: 15016 - DNA, 25 bp, Homo sapiens
aggaacctctaggcagtgacccatt

SEQ ID NO: 15017 - DNA, 25 bp, Homo sapiens
ggaacctctaggcagtgacccattc

SEQ ID NO: 15018 - DNA, 25 bp, Homo sapiens
gaacctctaggcagtgacccattca

SEQ ID NO: 15019 - DNA, 25 bp, Homo sapiens
aacctctaggcagtgacccattcag

SEQ ID NO: 15020 - DNA, 25 bp, Homo sapiens
acctctaggcagtgacccattcagc

SEQ ID NO: 15021 - DNA, 25 bp, Homo sapiens
cctctaggcagtgacccattcagct

SEQ ID NO: 15022 - DNA, 25 bp, Homo sapiens
ctctaggcagtgacccattcagctg

SEQ ID NO: 15023 - DNA, 25 bp, Homo sapiens
tctaggcagtgacccattcagctgg

SEQ ID NO: 15024 - DNA, 25 bp, Homo sapiens
ctaggcagtgacccattcagctgga

SEQ ID NO: 15025 - DNA, 25 bp, Homo sapiens
taggcagtgacccattcagctggaa

SEQ ID NO: 15026 - DNA, 25 bp, Homo sapiens
aggcagtgacccattcagctggaaa

SEQ ID NO: 15027 - DNA, 25 bp, Homo sapiens
ggcagtgacccattcagctggaaac

SEQ ID NO: 15028 - DNA, 25 bp, Homo sapiens
gcagtgacccattcagctggaaact

SEQ ID NO: 15029 - DNA, 25 bp, Homo sapiens
cagtgacccattcagctggaaactc

SEQ ID NO: 15030 - DNA, 25 bp, Homo sapiens
agtgacccattcagctggaaactcc

SEQ ID NO: 15031 - DNA, 25 bp, Homo sapiens
gtgacccattcagctggaaactccc

SEQ ID NO: 15032 - DNA, 25 bp, Homo sapiens
tgacccattcagctggaaactccca

SEQ ID NO: 15033 - DNA, 25 bp, Homo sapiens
gacccattcagctggaaactcccaa

SEQ ID NO: 15034 - DNA, 25 bp, Homo sapiens
acccattcagctggaaactcccaag

SEQ ID NO: 15035 - DNA, 25 bp, Homo sapiens
cccattcagctggaaactcccaagc

SEQ ID NO: 15036 - DNA, 25 bp, Homo sapiens
ccattcagctggaaactcccaagcc

SEQ ID NO: 15037 - DNA, 25 bp, Homo sapiens
cattcagctggaaactcccaagcct

SEQ ID NO: 15038 - DNA, 25 bp, Homo sapiens
attcagctggaaactcccaagcctc

SEQ ID NO: 15039 - DNA, 25 bp, Homo sapiens
ttcagctggaaactcccaagcctcg

SEQ ID NO: 15040 - DNA, 25 bp, Homo sapiens
tcagctggaaactcccaagcctcga

SEQ ID NO: 15041 - DNA, 25 bp, Homo sapiens
cagctggaaactcccaagcctcgac

SEQ ID NO: 15042 - DNA, 25 bp, Homo sapiens
agctggaaactcccaagcctcgact

SEQ ID NO: 15043 - DNA, 25 bp, Homo sapiens
gctggaaactcccaagcctcgacta

SEQ ID NO: 15044 - DNA, 25 bp, Homo sapiens
ctggaaactcccaagcctcgactac

SEQ ID NO: 15045 - DNA, 25 bp, Homo sapiens
tggaaactcccaagcctcgactacg

SEQ ID NO: 15046 - DNA, 25 bp, Homo sapiens
ggaaactcccaagcctcgactacga

SEQ ID NO: 15047 - DNA, 25 bp, Homo sapiens
gaaactcccaagcctcgactacgaa

SEQ ID NO: 15048 - DNA, 25 bp, Homo sapiens
aaactcccaagcctcgactacgaac

SEQ ID NO: 15049 - DNA, 25 bp, Homo sapiens
aactcccaagcctcgactacgaacg

SEQ ID NO: 15050 - DNA, 25 bp, Homo sapiens
actcccaagcctcgactacgaacgc

SEQ ID NO: 15051 - DNA, 25 bp, Homo sapiens
ctcccaagcctcgactacgaacgca

SEQ ID NO: 15052 - DNA, 25 bp, Homo sapiens
tcccaagcctcgactacgaacgcaa

SEQ ID NO: 15053 - DNA, 25 bp, Homo sapiens
cccaagcctcgactacgaacgcaag

SEQ ID NO: 15054 - DNA, 25 bp, Homo sapiens
ccaagcctcgactacgaacgcaaga

SEQ ID NO: 15055 - DNA, 25 bp, Homo sapiens
caagcctcgactacgaacgcaagac

SEQ ID NO: 15056 - DNA, 25 bp, Homo sapiens
aagcctcgactacgaacgcaagacc

SEQ ID NO: 15057 - DNA, 25 bp, Homo sapiens
agcctcgactacgaacgcaagacca

SEQ ID NO: 15058 - DNA, 25 bp, Homo sapiens
gcctcgactacgaacgcaagaccaa

SEQ ID NO: 15059 - DNA, 25 bp, Homo sapiens
cctcgactacgaacgcaagaccaaa

SEQ ID NO: 15060 - DNA, 25 bp, Homo sapiens
ctcgactacgaacgcaagaccaaag

SEQ ID NO: 15061 - DNA, 25 bp, Homo sapiens
tcgactacgaacgcaagaccaaagt

SEQ ID NO: 15062 - DNA, 25 bp, Homo sapiens
cgactacgaacgcaagaccaaagtg

SEQ ID NO: 15063 - DNA, 25 bp, Homo sapiens
gactacgaacgcaagaccaaagtgg

SEQ ID NO: 15064 - DNA, 25 bp, Homo sapiens
actacgaacgcaagaccaaagtgga

SEQ ID NO: 15065 - DNA, 25 bp, Homo sapiens
ctacgaacgcaagaccaaagtggac

SEQ ID NO: 15066 - DNA, 25 bp, Homo sapiens
tacgaacgcaagaccaaagtggact

SEQ ID NO: 15067 - DNA, 25 bp, Homo sapiens
acgaacgcaagaccaaagtggactt

SEQ ID NO: 15068 - DNA, 25 bp, Homo sapiens
cgaacgcaagaccaaagtggacttc

SEQ ID NO: 15069 - DNA, 25 bp, Homo sapiens
gaacgcaagaccaaagtggacttcg

SEQ ID NO: 15070 - DNA, 25 bp, Homo sapiens
aacgcaagaccaaagtggacttcga

SEQ ID NO: 15071 - DNA, 25 bp, Homo sapiens
acgcaagaccaaagtggacttcgat

SEQ ID NO: 15072 - DNA, 25 bp, Homo sapiens
cgcaagaccaaagtggacttcgatg

SEQ ID NO: 15073 - DNA, 25 bp, Homo sapiens
gcaagaccaaagtggacttcgatga

SEQ ID NO: 15074 - DNA, 25 bp, Homo sapiens
caagaccaaagtggacttcgatgac

SEQ ID NO: 15075 - DNA, 25 bp, Homo sapiens
aagaccaaagtggacttcgatgact

SEQ ID NO: 15076 - DNA, 25 bp, Homo sapiens
agaccaaagtggacttcgatgactt

SEQ ID NO: 15077 - DNA, 25 bp, Homo sapiens
gaccaaagtggacttcgatgacttc

SEQ ID NO: 15078 - DNA, 25 bp, Homo sapiens
accaaagtggacttcgatgacttcc

SEQ ID NO: 15079 - DNA, 25 bp, Homo sapiens
ccaaagtggacttcgatgacttcct

SEQ ID NO: 15080 - DNA, 25 bp, Homo sapiens
caaagtggacttcgatgacttcctc

SEQ ID NO: 15081 - DNA, 25 bp, Homo sapiens
aaagtggacttcgatgacttcctcc

SEQ ID NO: 15082 - DNA, 25 bp, Homo sapiens
aagtggacttcgatgacttcctccc

SEQ ID NO: 15083 - DNA, 25 bp, Homo sapiens
agtggacttcgatgacttcctccca

SEQ ID NO: 15084 - DNA, 25 bp, Homo sapiens
gtggacttcgatgacttcctcccag

SEQ ID NO: 15085 - DNA, 25 bp, Homo sapiens
tggacttcgatgacttcctcccagc

SEQ ID NO: 15086 - DNA, 25 bp, Homo sapiens
ggacttcgatgacttcctcccagct

SEQ ID NO: 15087 - DNA, 25 bp, Homo sapiens
gacttcgatgacttcctcccagcta

SEQ ID NO: 15088 - DNA, 25 bp, Homo sapiens
acttcgatgacttcctcccagctat

SEQ ID NO: 15089 - DNA, 25 bp, Homo sapiens
cttcgatgacttcctcccagctatc

SEQ ID NO: 15090 - DNA, 25 bp, Homo sapiens
ttcgatgacttcctcccagctatcc

SEQ ID NO: 15091 - DNA, 25 bp, Homo sapiens
tcgatgacttcctcccagctatccg

SEQ ID NO: 15092 - DNA, 25 bp, Homo sapiens
cgatgacttcctcccagctatccgg

SEQ ID NO: 15093 - DNA, 25 bp, Homo sapiens
gatgacttcctcccagctatccgga

SEQ ID NO: 15094 - DNA, 25 bp, Homo sapiens
atgacttcctcccagctatccggaa

SEQ ID NO: 15095 - DNA, 25 bp, Homo sapiens
tgacttcctcccagctatccggaag

SEQ ID NO: 15096 - DNA, 25 bp, Homo sapiens
gacttcctcccagctatccggaagc

SEQ ID NO: 15097 - DNA, 25 bp, Homo sapiens
acttcctcccagctatccggaagcc

SEQ ID NO: 15098 - DNA, 25 bp, Homo sapiens
cttcctcccagctatccggaagccc

SEQ ID NO: 15099 - DNA, 25 bp, Homo sapiens
ttcctcccagctatccggaagcccc

SEQ ID NO: 15100 - DNA, 25 bp, Homo sapiens
tcctcccagctatccggaagcccca

SEQ ID NO: 15101 - DNA, 25 bp, Homo sapiens
cctcccagctatccggaagccccag

SEQ ID NO: 15102 - DNA, 25 bp, Homo sapiens
ctcccagctatccggaagccccaga

SEQ ID NO: 15103 - DNA, 25 bp, Homo sapiens
tcccagctatccggaagccccagac

SEQ ID NO: 15104 - DNA, 25 bp, Homo sapiens
cccagctatccggaagccccagaca

SEQ ID NO: 15105 - DNA, 25 bp, Homo sapiens
ccagctatccggaagccccagacac

SEQ ID NO: 15106 - DNA, 25 bp, Homo sapiens
cagctatccggaagccccagacacc

SEQ ID NO: 15107 - DNA, 25 bp, Homo sapiens
agctatccggaagccccagacacct

SEQ ID NO: 15108 - DNA, 25 bp, Homo sapiens
gctatccggaagccccagacaccta

SEQ ID NO: 15109 - DNA, 25 bp, Homo sapiens
ctatccggaagccccagacacctac

SEQ ID NO: 15110 - DNA, 25 bp, Homo sapiens
tatccggaagccccagacacctacc

SEQ ID NO: 15111 - DNA, 25 bp, Homo sapiens
atccggaagccccagacacctacct

SEQ ID NO: 15112 - DNA, 25 bp, Homo sapiens
tccggaagccccagacacctacctc

SEQ ID NO: 15113 - DNA, 25 bp, Homo sapiens
ccggaagccccagacacctacctcc

SEQ ID NO: 15114 - DNA, 25 bp, Homo sapiens
cggaagccccagacacctacctcct

SEQ ID NO: 15115 - DNA, 25 bp, Homo sapiens
ggaagccccagacacctacctcctt

SEQ ID NO: 15116 - DNA, 25 bp, Homo sapiens
gaagccccagacacctacctccttg

SEQ ID NO: 15117 - DNA, 25 bp, Homo sapiens
aagccccagacacctacctccttgg

SEQ ID NO: 15118 - DNA, 25 bp, Homo sapiens
agccccagacacctacctccttggc

SEQ ID NO: 15119 - DNA, 25 bp, Homo sapiens
gccccagacacctacctccttggct

SEQ ID NO: 15120 - DNA, 25 bp, Homo sapiens
ccccagacacctacctccttggctg

SEQ ID NO: 15121 - DNA, 25 bp, Homo sapiens
cccagacacctacctccttggctgg

SEQ ID NO: 15122 - DNA, 25 bp, Homo sapiens
ccagacacctacctccttggctgga

SEQ ID NO: 15123 - DNA, 25 bp, Homo sapiens
cagacacctacctccttggctggat

SEQ ID NO: 15124 - DNA, 25 bp, Homo sapiens
agacacctacctccttggctggatc

SEQ ID NO: 15125 - DNA, 25 bp, Homo sapiens
gacacctacctccttggctggatca

SEQ ID NO: 15126 - DNA, 25 bp, Homo sapiens
acacctacctccttggctggatcag

SEQ ID NO: 15127 - DNA, 25 bp, Homo sapiens
cacctacctccttggctggatcagc

SEQ ID NO: 15128 - DNA, 25 bp, Homo sapiens
acctacctccttggctggatcagcc

SEQ ID NO: 15129 - DNA, 25 bp, Homo sapiens
cctacctccttggctggatcagcca

SEQ ID NO: 15130 - DNA, 25 bp, Homo sapiens
ctacctccttggctggatcagccaa

SEQ ID NO: 15131 - DNA, 25 bp, Homo sapiens
tacctccttggctggatcagccaaa

SEQ ID NO: 15132 - DNA, 25 bp, Homo sapiens
acctccttggctggatcagccaaag

SEQ ID NO: 15133 - DNA, 25 bp, Homo sapiens
cctccttggctggatcagccaaagg

SEQ ID NO: 15134 - DNA, 25 bp, Homo sapiens
ctccttggctggatcagccaaaggt

SEQ ID NO: 15135 - DNA, 25 bp, Homo sapiens
tccttggctggatcagccaaaggtg

SEQ ID NO: 15136 - DNA, 25 bp, Homo sapiens
ccttggctggatcagccaaaggtgg

SEQ ID NO: 15137 - DNA, 25 bp, Homo sapiens
cttggctggatcagccaaaggtggg

SEQ ID NO: 15138 - DNA, 25 bp, Homo sapiens
ttggctggatcagccaaaggtgggc

SEQ ID NO: 15139 - DNA, 25 bp, Homo sapiens
tggctggatcagccaaaggtgggca

SEQ ID NO: 15140 - DNA, 25 bp, Homo sapiens
ggctggatcagccaaaggtgggcaa

SEQ ID NO: 15141 - DNA, 25 bp, Homo sapiens
gctggatcagccaaaggtgggcaag

SEQ ID NO: 15142 - DNA, 25 bp, Homo sapiens
ctggatcagccaaaggtgggcaaga

SEQ ID NO: 15143 - DNA, 25 bp, Homo sapiens
tggatcagccaaaggtgggcaagac

SEQ ID NO: 15144 - DNA, 25 bp, Homo sapiens
ggatcagccaaaggtgggcaagacg

SEQ ID NO: 15145 - DNA, 25 bp, Homo sapiens
gatcagccaaaggtgggcaagacgg

SEQ ID NO: 15146 - DNA, 25 bp, Homo sapiens
atcagccaaaggtgggcaagacggt

SEQ ID NO: 15147 - DNA, 25 bp, Homo sapiens
tcagccaaaggtgggcaagacggtt

SEQ ID NO: 15148 - DNA, 25 bp, Homo sapiens
cagccaaaggtgggcaagacggttc

SEQ ID NO: 15149 - DNA, 25 bp, Homo sapiens
agccaaaggtgggcaagacggttca

SEQ ID NO: 15150 - DNA, 25 bp, Homo sapiens
gccaaaggtgggcaagacggttcac

SEQ ID NO: 15151 - DNA, 25 bp, Homo sapiens
ccaaaggtgggcaagacggttcaca

SEQ ID NO: 15152 - DNA, 25 bp, Homo sapiens
caaaggtgggcaagacggttcacag

SEQ ID NO: 15153 - DNA, 25 bp, Homo sapiens
aaaggtgggcaagacggttcacagc

SEQ ID NO: 15154 - DNA, 25 bp, Homo sapiens
aaggtgggcaagacggttcacagcg

SEQ ID NO: 15155 - DNA, 25 bp, Homo sapiens
aggtgggcaagacggttcacagcgt

SEQ ID NO: 15156 - DNA, 25 bp, Homo sapiens
ggtgggcaagacggttcacagcgtt

SEQ ID NO: 15157 - DNA, 25 bp, Homo sapiens
gtgggcaagacggttcacagcgttc

SEQ ID NO: 15158 - DNA, 25 bp, Homo sapiens
tgggcaagacggttcacagcgttca

SEQ ID NO: 15159 - DNA, 25 bp, Homo sapiens
gggcaagacggttcacagcgttcaa

SEQ ID NO: 15160 - DNA, 25 bp, Homo sapiens
ggcaagacggttcacagcgttcaag

SEQ ID NO: 15161 - DNA, 25 bp, Homo sapiens
gcaagacggttcacagcgttcaagc

SEQ ID NO: 15162 - DNA, 25 bp, Homo sapiens
caagacggttcacagcgttcaagca

SEQ ID NO: 15163 - DNA, 25 bp, Homo sapiens
aagacggttcacagcgttcaagcat

SEQ ID NO: 15164 - DNA, 25 bp, Homo sapiens
agacggttcacagcgttcaagcatc

SEQ ID NO: 15165 - DNA, 25 bp, Homo sapiens
gacggttcacagcgttcaagcatcc

SEQ ID NO: 15166 - DNA, 25 bp, Homo sapiens
acggttcacagcgttcaagcatcca

SEQ ID NO: 15167 - DNA, 25 bp, Homo sapiens
cggttcacagcgttcaagcatccac

SEQ ID NO: 15168 - DNA, 25 bp, Homo sapiens
ggttcacagcgttcaagcatccact

SEQ ID NO: 15169 - DNA, 25 bp, Homo sapiens
gttcacagcgttcaagcatccactt

SEQ ID NO: 15170 - DNA, 25 bp, Homo sapiens
ttcacagcgttcaagcatccacttt

SEQ ID NO: 15171 - DNA, 25 bp, Homo sapiens
tcacagcgttcaagcatccactttg

SEQ ID NO: 15172 - DNA, 25 bp, Homo sapiens
cacagcgttcaagcatccactttga

SEQ ID NO: 15173 - DNA, 25 bp, Homo sapiens
acagcgttcaagcatccactttgaa

SEQ ID NO: 15174 - DNA, 25 bp, Homo sapiens
cagcgttcaagcatccactttgaaa

SEQ ID NO: 15175 - DNA, 25 bp, Homo sapiens
agcgttcaagcatccactttgaaac

SEQ ID NO: 15176 - DNA, 25 bp, Homo sapiens
gcgttcaagcatccactttgaaacg

SEQ ID NO: 15177 - DNA, 25 bp, Homo sapiens
cgttcaagcatccactttgaaacgg

SEQ ID NO: 15178 - DNA, 25 bp, Homo sapiens
gttcaagcatccactttgaaacgga

SEQ ID NO: 15179 - DNA, 25 bp, Homo sapiens
ttcaagcatccactttgaaacggaa

SEQ ID NO: 15180 - DNA, 25 bp, Homo sapiens
tcaagcatccactttgaaacggaag

SEQ ID NO: 15181 - DNA, 25 bp, Homo sapiens
caagcatccactttgaaacggaaga

SEQ ID NO: 15182 - DNA, 25 bp, Homo sapiens
aagcatccactttgaaacggaagag

SEQ ID NO: 15183 - DNA, 25 bp, Homo sapiens
agcatccactttgaaacggaagagg

SEQ ID NO: 15184 - DNA, 25 bp, Homo sapiens
gcatccactttgaaacggaagaggc

SEQ ID NO: 15185 - DNA, 25 bp, Homo sapiens
catccactttgaaacggaagaggct

SEQ ID NO: 15186 - DNA, 25 bp, Homo sapiens
atccactttgaaacggaagaggcta

SEQ ID NO: 15187 - DNA, 25 bp, Homo sapiens
tccactttgaaacggaagaggctaa

SEQ ID NO: 15188 - DNA, 25 bp, Homo sapiens
ccactttgaaacggaagaggctaac

SEQ ID NO: 15189 - DNA, 25 bp, Homo sapiens
cactttgaaacggaagaggctaacc

SEQ ID NO: 15190 - DNA, 25 bp, Homo sapiens
actttgaaacggaagaggctaaccg

SEQ ID NO: 15191 - DNA, 25 bp, Homo sapiens
ctttgaaacggaagaggctaaccgt

SEQ ID NO: 15192 - DNA, 25 bp, Homo sapiens
tttgaaacggaagaggctaaccgtt

SEQ ID NO: 15193 - DNA, 25 bp, Homo sapiens
ttgaaacggaagaggctaaccgttc

SEQ ID NO: 15194 - DNA, 25 bp, Homo sapiens
tgaaacggaagaggctaaccgttcc

SEQ ID NO: 15195 - DNA, 25 bp, Homo sapiens
gaaacggaagaggctaaccgttcct

SEQ ID NO: 15196 - DNA, 25 bp, Homo sapiens
aaacggaagaggctaaccgttcctt

SEQ ID NO: 15197 - DNA, 25 bp, Homo sapiens
aacggaagaggctaaccgttccttt

SEQ ID NO: 15198 - DNA, 25 bp, Homo sapiens
acggaagaggctaaccgttcctttc

SEQ ID NO: 15199 - DNA, 25 bp, Homo sapiens
cggaagaggctaaccgttcctttct

SEQ ID NO: 15200 - DNA, 25 bp, Homo sapiens
ggaagaggctaaccgttcctttctc

SEQ ID NO: 15201 - DNA, 25 bp, Homo sapiens
gaagaggctaaccgttcctttctct

SEQ ID NO: 15202 - DNA, 25 bp, Homo sapiens
aagaggctaaccgttcctttctctc

SEQ ID NO: 15203 - DNA, 25 bp, Homo sapiens
agaggctaaccgttcctttctctcg

SEQ ID NO: 15204 - DNA, 25 bp, Homo sapiens
gaggctaaccgttcctttctctcgg

SEQ ID NO: 15205 - DNA, 25 bp, Homo sapiens
aggctaaccgttcctttctctcggg

SEQ ID NO: 15206 - DNA, 25 bp, Homo sapiens
ggctaaccgttcctttctctcgggg

SEQ ID NO: 15207 - DNA, 25 bp, Homo sapiens
gctaaccgttcctttctctcgggga

SEQ ID NO: 15208 - DNA, 25 bp, Homo sapiens
ctaaccgttcctttctctcggggat

SEQ ID NO: 15209 - DNA, 25 bp, Homo sapiens
taaccgttcctttctctcggggatc

SEQ ID NO: 15210 - DNA, 25 bp, Homo sapiens
aaccgttcctttctctcggggatca

SEQ ID NO: 15211 - DNA, 25 bp, Homo sapiens
accgttcctttctctcggggatcaa

SEQ ID NO: 15212 - DNA, 25 bp, Homo sapiens
ccgttcctttctctcggggatcaag

SEQ ID NO: 15213 - DNA, 25 bp, Homo sapiens
cgttcctttctctcggggatcaaga

SEQ ID NO: 15214 - DNA, 25 bp, Homo sapiens
gttcctttctctcggggatcaagac

SEQ ID NO: 15215 - DNA, 25 bp, Homo sapiens
ttcctttctctcggggatcaagacc

SEQ ID NO: 15216 - DNA, 25 bp, Homo sapiens
tcctttctctcggggatcaagacca

SEQ ID NO: 15217 - DNA, 25 bp, Homo sapiens
cctttctctcggggatcaagaccat

SEQ ID NO: 15218 - DNA, 25 bp, Homo sapiens
ctttctctcggggatcaagaccatt

SEQ ID NO: 15219 - DNA, 25 bp, Homo sapiens
tttctctcggggatcaagaccattt

SEQ ID NO: 15220 - DNA, 25 bp, Homo sapiens
ttctctcggggatcaagaccatttt

SEQ ID NO: 15221 - DNA, 25 bp, Homo sapiens
tctctcggggatcaagaccattttg

SEQ ID NO: 15222 - DNA, 25 bp, Homo sapiens
ctctcggggatcaagaccattttga

SEQ ID NO: 15223 - DNA, 25 bp, Homo sapiens
tctcggggatcaagaccattttgaa

SEQ ID NO: 15224 - DNA, 25 bp, Homo sapiens
ctcggggatcaagaccattttgaag

SEQ ID NO: 15225 - DNA, 25 bp, Homo sapiens
tcggggatcaagaccattttgaaga

SEQ ID NO: 15226 - DNA, 25 bp, Homo sapiens
cggggatcaagaccattttgaagaa

SEQ ID NO: 15227 - DNA, 25 bp, Homo sapiens
ggggatcaagaccattttgaagaag

SEQ ID NO: 15228 - DNA, 25 bp, Homo sapiens
gggatcaagaccattttgaagaaga

SEQ ID NO: 15229 - DNA, 25 bp, Homo sapiens
ggatcaagaccattttgaagaagag

SEQ ID NO: 15230 - DNA, 25 bp, Homo sapiens
gatcaagaccattttgaagaagagc

SEQ ID NO: 15231 - DNA, 25 bp, Homo sapiens
atcaagaccattttgaagaagagcc

SEQ ID NO: 15232 - DNA, 25 bp, Homo sapiens
tcaagaccattttgaagaagagccc

SEQ ID NO: 15233 - DNA, 25 bp, Homo sapiens
caagaccattttgaagaagagcccg

SEQ ID NO: 15234 - DNA, 25 bp, Homo sapiens
aagaccattttgaagaagagcccgg

SEQ ID NO: 15235 - DNA, 25 bp, Homo sapiens
agaccattttgaagaagagcccgga

SEQ ID NO: 15236 - DNA, 25 bp, Homo sapiens
gaccattttgaagaagagcccggag

SEQ ID NO: 15237 - DNA, 25 bp, Homo sapiens
accattttgaagaagagcccggagc

SEQ ID NO: 15238 - DNA, 25 bp, Homo sapiens
ccattttgaagaagagcccggagcc

SEQ ID NO: 15239 - DNA, 25 bp, Homo sapiens
cattttgaagaagagcccggagccc

SEQ ID NO: 15240 - DNA, 25 bp, Homo sapiens
attttgaagaagagcccggagccca

SEQ ID NO: 15241 - DNA, 25 bp, Homo sapiens
ttttgaagaagagcccggagcccaa

SEQ ID NO: 15242 - DNA, 25 bp, Homo sapiens
tttgaagaagagcccggagcccaag

SEQ ID NO: 15243 - DNA, 25 bp, Homo sapiens
ttgaagaagagcccggagcccaagg

SEQ ID NO: 15244 - DNA, 25 bp, Homo sapiens
tgaagaagagcccggagcccaagga

SEQ ID NO: 15245 - DNA, 25 bp, Homo sapiens
gaagaagagcccggagcccaaggag

SEQ ID NO: 15246 - DNA, 25 bp, Homo sapiens
aagaagagcccggagcccaaggagg

SEQ ID NO: 15247 - DNA, 25 bp, Homo sapiens
agaagagcccggagcccaaggagga

SEQ ID NO: 15248 - DNA, 25 bp, Homo sapiens
gaagagcccggagcccaaggaggat

SEQ ID NO: 15249 - DNA, 25 bp, Homo sapiens
aagagcccggagcccaaggaggatc

SEQ ID NO: 15250 - DNA, 25 bp, Homo sapiens
agagcccggagcccaaggaggatcc

SEQ ID NO: 15251 - DNA, 25 bp, Homo sapiens
gagcccggagcccaaggaggatccc

SEQ ID NO: 15252 - DNA, 25 bp, Homo sapiens
agcccggagcccaaggaggatcccg

SEQ ID NO: 15253 - DNA, 25 bp, Homo sapiens
gcccggagcccaaggaggatcccgc

SEQ ID NO: 15254 - DNA, 25 bp, Homo sapiens
cccggagcccaaggaggatcccgct

SEQ ID NO: 15255 - DNA, 25 bp, Homo sapiens
ccggagcccaaggaggatcccgctc

SEQ ID NO: 15256 - DNA, 25 bp, Homo sapiens
cggagcccaaggaggatcccgctca

SEQ ID NO: 15257 - DNA, 25 bp, Homo sapiens
ggagcccaaggaggatcccgctcac

SEQ ID NO: 15258 - DNA, 25 bp, Homo sapiens
gagcccaaggaggatcccgctcacc

SEQ ID NO: 15259 - DNA, 25 bp, Homo sapiens
agcccaaggaggatcccgctcacct

SEQ ID NO: 15260 - DNA, 25 bp, Homo sapiens
gcccaaggaggatcccgctcacctg

SEQ ID NO: 15261 - DNA, 25 bp, Homo sapiens
cccaaggaggatcccgctcacctgt

SEQ ID NO: 15262 - DNA, 25 bp, Homo sapiens
ccaaggaggatcccgctcacctgtc

SEQ ID NO: 15263 - DNA, 25 bp, Homo sapiens
caaggaggatcccgctcacctgtct

SEQ ID NO: 15264 - DNA, 25 bp, Homo sapiens
aaggaggatcccgctcacctgtctg

SEQ ID NO: 15265 - DNA, 25 bp, Homo sapiens
aggaggatcccgctcacctgtctga

SEQ ID NO: 15266 - DNA, 25 bp, Homo sapiens
ggaggatcccgctcacctgtctgac

SEQ ID NO: 15267 - DNA, 25 bp, Homo sapiens
gaggatcccgctcacctgtctgact

SEQ ID NO: 15268 - DNA, 25 bp, Homo sapiens
aggatcccgctcacctgtctgactc

SEQ ID NO: 15269 - DNA, 25 bp, Homo sapiens
ggatcccgctcacctgtctgactcg

SEQ ID NO: 15270 - DNA, 25 bp, Homo sapiens
gatcccgctcacctgtctgactcgt

SEQ ID NO: 15271 - DNA, 25 bp, Homo sapiens
atcccgctcacctgtctgactcgtc

SEQ ID NO: 15272 - DNA, 25 bp, Homo sapiens
tcccgctcacctgtctgactcgtcc

SEQ ID NO: 15273 - DNA, 25 bp, Homo sapiens
cccgctcacctgtctgactcgtcct

SEQ ID NO: 15274 - DNA, 25 bp, Homo sapiens
ccgctcacctgtctgactcgtcctc

SEQ ID NO: 15275 - DNA, 25 bp, Homo sapiens
cgctcacctgtctgactcgtcctca

SEQ ID NO: 15276 - DNA, 25 bp, Homo sapiens
gctcacctgtctgactcgtcctcat

SEQ ID NO: 15277 - DNA, 25 bp, Homo sapiens
ctcacctgtctgactcgtcctcatc

SEQ ID NO: 15278 - DNA, 25 bp, Homo sapiens
tcacctgtctgactcgtcctcatcc

SEQ ID NO: 15279 - DNA, 25 bp, Homo sapiens
cacctgtctgactcgtcctcatcct

SEQ ID NO: 15280 - DNA, 25 bp, Homo sapiens
acctgtctgactcgtcctcatcctc

SEQ ID NO: 15281 - DNA, 25 bp, Homo sapiens
cctgtctgactcgtcctcatcctcc

SEQ ID NO: 15282 - DNA, 25 bp, Homo sapiens
ctgtctgactcgtcctcatcctccg

SEQ ID NO: 15283 - DNA, 25 bp, Homo sapiens
tgtctgactcgtcctcatcctccgg

SEQ ID NO: 15284 - DNA, 25 bp, Homo sapiens
gtctgactcgtcctcatcctccggc

SEQ ID NO: 15285 - DNA, 25 bp, Homo sapiens
tctgactcgtcctcatcctccggct

SEQ ID NO: 15286 - DNA, 25 bp, Homo sapiens
ctgactcgtcctcatcctccggctc

SEQ ID NO: 15287 - DNA, 25 bp, Homo sapiens
tgactcgtcctcatcctccggctcc

SEQ ID NO: 15288 - DNA, 25 bp, Homo sapiens
gactcgtcctcatcctccggctcca

SEQ ID NO: 15289 - DNA, 25 bp, Homo sapiens
actcgtcctcatcctccggctccat

SEQ ID NO: 15290 - DNA, 25 bp, Homo sapiens
ctcgtcctcatcctccggctccatc

SEQ ID NO: 15291 - DNA, 25 bp, Homo sapiens
tcgtcctcatcctccggctccatcg

SEQ ID NO: 15292 - DNA, 25 bp, Homo sapiens
cgtcctcatcctccggctccatcgt

SEQ ID NO: 15293 - DNA, 25 bp, Homo sapiens
gtcctcatcctccggctccatcgtg

SEQ ID NO: 15294 - DNA, 25 bp, Homo sapiens
tcctcatcctccggctccatcgtgt

SEQ ID NO: 15295 - DNA, 25 bp, Homo sapiens
cctcatcctccggctccatcgtgtc

SEQ ID NO: 15296 - DNA, 25 bp, Homo sapiens
ctcatcctccggctccatcgtgtcc

SEQ ID NO: 15297 - DNA, 25 bp, Homo sapiens
tcatcctccggctccatcgtgtcct

SEQ ID NO: 15298 - DNA, 25 bp, Homo sapiens
catcctccggctccatcgtgtcctt

SEQ ID NO: 15299 - DNA, 25 bp, Homo sapiens
atcctccggctccatcgtgtccttc

SEQ ID NO: 15300 - DNA, 25 bp, Homo sapiens
tcctccggctccatcgtgtccttca

SEQ ID NO: 15301 - DNA, 25 bp, Homo sapiens
cctccggctccatcgtgtccttcaa

SEQ ID NO: 15302 - DNA, 25 bp, Homo sapiens
ctccggctccatcgtgtccttcaaa

SEQ ID NO: 15303 - DNA, 25 bp, Homo sapiens
tccggctccatcgtgtccttcaaaa

SEQ ID NO: 15304 - DNA, 25 bp, Homo sapiens
ccggctccatcgtgtccttcaaaag

SEQ ID NO: 15305 - DNA, 25 bp, Homo sapiens
cggctccatcgtgtccttcaaaagt

SEQ ID NO: 15306 - DNA, 25 bp, Homo sapiens
ggctccatcgtgtccttcaaaagtg

SEQ ID NO: 15307 - DNA, 25 bp, Homo sapiens
gctccatcgtgtccttcaaaagtgc

SEQ ID NO: 15308 - DNA, 25 bp, Homo sapiens
ctccatcgtgtccttcaaaagtgct

SEQ ID NO: 15309 - DNA, 25 bp, Homo sapiens
tccatcgtgtccttcaaaagtgctg

SEQ ID NO: 15310 - DNA, 25 bp, Homo sapiens
ccatcgtgtccttcaaaagtgctga

SEQ ID NO: 15311 - DNA, 25 bp, Homo sapiens
catcgtgtccttcaaaagtgctgac

SEQ ID NO: 15312 - DNA, 25 bp, Homo sapiens
atcgtgtccttcaaaagtgctgaca

SEQ ID NO: 15313 - DNA, 25 bp, Homo sapiens
tcgtgtccttcaaaagtgctgacag

SEQ ID NO: 15314 - DNA, 25 bp, Homo sapiens
cgtgtccttcaaaagtgctgacagc

SEQ ID NO: 15315 - DNA, 25 bp, Homo sapiens
gtgtccttcaaaagtgctgacagca

SEQ ID NO: 15316 - DNA, 25 bp, Homo sapiens
tgtccttcaaaagtgctgacagcat

SEQ ID NO: 15317 - DNA, 25 bp, Homo sapiens
gtccttcaaaagtgctgacagcatc

SEQ ID NO: 15318 - DNA, 25 bp, Homo sapiens
tccttcaaaagtgctgacagcatca

SEQ ID NO: 15319 - DNA, 25 bp, Homo sapiens
ccttcaaaagtgctgacagcatcaa

SEQ ID NO: 15320 - DNA, 25 bp, Homo sapiens
cttcaaaagtgctgacagcatcaaa

SEQ ID NO: 15321 - DNA, 25 bp, Homo sapiens
ttcaaaagtgctgacagcatcaaaa

SEQ ID NO: 15322 - DNA, 25 bp, Homo sapiens
tcaaaagtgctgacagcatcaaaag

SEQ ID NO: 15323 - DNA, 25 bp, Homo sapiens
caaaagtgctgacagcatcaaaagt

SEQ ID NO: 15324 - DNA, 25 bp, Homo sapiens
aaaagtgctgacagcatcaaaagtc

SEQ ID NO: 15325 - DNA, 25 bp, Homo sapiens
aaagtgctgacagcatcaaaagtcg

SEQ ID NO: 15326 - DNA, 25 bp, Homo sapiens
aagtgctgacagcatcaaaagtcga

SEQ ID NO: 15327 - DNA, 25 bp, Homo sapiens
agtgctgacagcatcaaaagtcgac

SEQ ID NO: 15328 - DNA, 25 bp, Homo sapiens
gtgctgacagcatcaaaagtcgacc

SEQ ID NO: 15329 - DNA, 25 bp, Homo sapiens
tgctgacagcatcaaaagtcgacca

SEQ ID NO: 15330 - DNA, 25 bp, Homo sapiens
gctgacagcatcaaaagtcgaccag

SEQ ID NO: 15331 - DNA, 25 bp, Homo sapiens
ctgacagcatcaaaagtcgaccagg

SEQ ID NO: 15332 - DNA, 25 bp, Homo sapiens
tgacagcatcaaaagtcgaccagga

SEQ ID NO: 15333 - DNA, 25 bp, Homo sapiens
gacagcatcaaaagtcgaccaggaa

SEQ ID NO: 15334 - DNA, 25 bp, Homo sapiens
acagcatcaaaagtcgaccaggaat

SEQ ID NO: 15335 - DNA, 25 bp, Homo sapiens
cagcatcaaaagtcgaccaggaatc

SEQ ID NO: 15336 - DNA, 25 bp, Homo sapiens
agcatcaaaagtcgaccaggaatcc

SEQ ID NO: 15337 - DNA, 25 bp, Homo sapiens
gcatcaaaagtcgaccaggaatccc

SEQ ID NO: 15338 - DNA, 25 bp, Homo sapiens
catcaaaagtcgaccaggaatccca

SEQ ID NO: 15339 - DNA, 25 bp, Homo sapiens
atcaaaagtcgaccaggaatcccac

SEQ ID NO: 15340 - DNA, 25 bp, Homo sapiens
tcaaaagtcgaccaggaatcccacg

SEQ ID NO: 15341 - DNA, 25 bp, Homo sapiens
caaaagtcgaccaggaatcccacga

SEQ ID NO: 15342 - DNA, 25 bp, Homo sapiens
aaaagtcgaccaggaatcccacgac

SEQ ID NO: 15343 - DNA, 25 bp, Homo sapiens
aaagtcgaccaggaatcccacgact

SEQ ID NO: 15344 - DNA, 25 bp, Homo sapiens
aagtcgaccaggaatcccacgactt

SEQ ID NO: 15345 - DNA, 25 bp, Homo sapiens
agtcgaccaggaatcccacgacttg

SEQ ID NO: 15346 - DNA, 25 bp, Homo sapiens
gtcgaccaggaatcccacgacttgc

SEQ ID NO: 15347 - DNA, 25 bp, Homo sapiens
tcgaccaggaatcccacgacttgcg

SEQ ID NO: 15348 - DNA, 25 bp, Homo sapiens
cgaccaggaatcccacgacttgcgg

SEQ ID NO: 15349 - DNA, 25 bp, Homo sapiens
gaccaggaatcccacgacttgcggg

SEQ ID NO: 15350 - DNA, 25 bp, Homo sapiens
accaggaatcccacgacttgcgggt

SEQ ID NO: 15351 - DNA, 25 bp, Homo sapiens
ccaggaatcccacgacttgcgggtg

SEQ ID NO: 15352 - DNA, 25 bp, Homo sapiens
caggaatcccacgacttgcgggtga

SEQ ID NO: 15353 - DNA, 25 bp, Homo sapiens
aggaatcccacgacttgcgggtgac

SEQ ID NO: 15354 - DNA, 25 bp, Homo sapiens
ggaatcccacgacttgcgggtgacg

SEQ ID NO: 15355 - DNA, 25 bp, Homo sapiens
gaatcccacgacttgcgggtgacgg

SEQ ID NO: 15356 - DNA, 25 bp, Homo sapiens
aatcccacgacttgcgggtgacggt

SEQ ID NO: 15357 - DNA, 25 bp, Homo sapiens
atcccacgacttgcgggtgacggtg

SEQ ID NO: 15358 - DNA, 25 bp, Homo sapiens
tcccacgacttgcgggtgacggtgg

SEQ ID NO: 15359 - DNA, 25 bp, Homo sapiens
cccacgacttgcgggtgacggtggc

SEQ ID NO: 15360 - DNA, 25 bp, Homo sapiens
ccacgacttgcgggtgacggtggcg

SEQ ID NO: 15361 - DNA, 25 bp, Homo sapiens
cacgacttgcgggtgacggtggcga

SEQ ID NO: 15362 - DNA, 25 bp, Homo sapiens
acgacttgcgggtgacggtggcgag

SEQ ID NO: 15363 - DNA, 25 bp, Homo sapiens
cgacttgcgggtgacggtggcgagc

SEQ ID NO: 15364 - DNA, 25 bp, Homo sapiens
gacttgcgggtgacggtggcgagcg

SEQ ID NO: 15365 - DNA, 25 bp, Homo sapiens
acttgcgggtgacggtggcgagcga

SEQ ID NO: 15366 - DNA, 25 bp, Homo sapiens
cttgcgggtgacggtggcgagcgaa

SEQ ID NO: 15367 - DNA, 25 bp, Homo sapiens
ttgcgggtgacggtggcgagcgaac

SEQ ID NO: 15368 - DNA, 25 bp, Homo sapiens
tgcgggtgacggtggcgagcgaacg

SEQ ID NO: 15369 - DNA, 25 bp, Homo sapiens
gcgggtgacggtggcgagcgaacgt

SEQ ID NO: 15370 - DNA, 25 bp, Homo sapiens
cgggtgacggtggcgagcgaacgtc

SEQ ID NO: 15371 - DNA, 25 bp, Homo sapiens
gggtgacggtggcgagcgaacgtcc

SEQ ID NO: 15372 - DNA, 25 bp, Homo sapiens
ggtgacggtggcgagcgaacgtccc

SEQ ID NO: 15373 - DNA, 25 bp, Homo sapiens
gtgacggtggcgagcgaacgtcccc

SEQ ID NO: 15374 - DNA, 25 bp, Homo sapiens
tgacggtggcgagcgaacgtccccc

SEQ ID NO: 15375 - DNA, 25 bp, Homo sapiens
gacggtggcgagcgaacgtcccccg

SEQ ID NO: 15376 - DNA, 25 bp, Homo sapiens
acggtggcgagcgaacgtcccccga

SEQ ID NO: 15377 - DNA, 25 bp, Homo sapiens
cggtggcgagcgaacgtcccccgag

SEQ ID NO: 15378 - DNA, 25 bp, Homo sapiens
ggtggcgagcgaacgtcccccgagc

SEQ ID NO: 15379 - DNA, 25 bp, Homo sapiens
gtggcgagcgaacgtcccccgagcg

SEQ ID NO: 15380 - DNA, 25 bp, Homo sapiens
tggcgagcgaacgtcccccgagcgg

SEQ ID NO: 15381 - DNA, 25 bp, Homo sapiens
ggcgagcgaacgtcccccgagcgga

SEQ ID NO: 15382 - DNA, 25 bp, Homo sapiens
gcgagcgaacgtcccccgagcggag

SEQ ID NO: 15383 - DNA, 25 bp, Homo sapiens
cgagcgaacgtcccccgagcggaga

SEQ ID NO: 15384 - DNA, 25 bp, Homo sapiens
gagcgaacgtcccccgagcggagag

SEQ ID NO: 15385 - DNA, 25 bp, Homo sapiens
agcgaacgtcccccgagcggagaga

SEQ ID NO: 15386 - DNA, 25 bp, Homo sapiens
gcgaacgtcccccgagcggagagag

SEQ ID NO: 15387 - DNA, 25 bp, Homo sapiens
cgaacgtcccccgagcggagagagc

SEQ ID NO: 15388 - DNA, 25 bp, Homo sapiens
gaacgtcccccgagcggagagagcc

SEQ ID NO: 15389 - DNA, 25 bp, Homo sapiens
aacgtcccccgagcggagagagcca

SEQ ID NO: 15390 - DNA, 25 bp, Homo sapiens
acgtcccccgagcggagagagccag

SEQ ID NO: 15391 - DNA, 25 bp, Homo sapiens
cgtcccccgagcggagagagccagg

SEQ ID NO: 15392 - DNA, 25 bp, Homo sapiens
gtcccccgagcggagagagccaggg

SEQ ID NO: 15393 - DNA, 25 bp, Homo sapiens
tcccccgagcggagagagccaggga

SEQ ID NO: 15394 - DNA, 25 bp, Homo sapiens
cccccgagcggagagagccagggac

SEQ ID NO: 15395 - DNA, 25 bp, Homo sapiens
ccccgagcggagagagccagggacg

SEQ ID NO: 15396 - DNA, 25 bp, Homo sapiens
cccgagcggagagagccagggacgg

SEQ ID NO: 15397 - DNA, 25 bp, Homo sapiens
ccgagcggagagagccagggacggg

SEQ ID NO: 15398 - DNA, 25 bp, Homo sapiens
cgagcggagagagccagggacgggg

SEQ ID NO: 15399 - DNA, 25 bp, Homo sapiens
gagcggagagagccagggacgggga

SEQ ID NO: 15400 - DNA, 25 bp, Homo sapiens
agcggagagagccagggacggggag

SEQ ID NO: 15401 - DNA, 25 bp, Homo sapiens
gcggagagagccagggacggggagg

SEQ ID NO: 15402 - DNA, 25 bp, Homo sapiens
cggagagagccagggacggggagga

SEQ ID NO: 15403 - DNA, 25 bp, Homo sapiens
ggagagagccagggacggggaggaa

SEQ ID NO: 15404 - DNA, 25 bp, Homo sapiens
gagagagccagggacggggaggaaa

SEQ ID NO: 15405 - DNA, 25 bp, Homo sapiens
agagagccagggacggggaggaaag

SEQ ID NO: 15406 - DNA, 25 bp, Homo sapiens
gagagccagggacggggaggaaaga

SEQ ID NO: 15407 - DNA, 25 bp, Homo sapiens
agagccagggacggggaggaaagac

SEQ ID NO: 15408 - DNA, 25 bp, Homo sapiens
gagccagggacggggaggaaagacg

SEQ ID NO: 15409 - DNA, 25 bp, Homo sapiens
agccagggacggggaggaaagacga

SEQ ID NO: 15410 - DNA, 25 bp, Homo sapiens
gccagggacggggaggaaagacgac

SEQ ID NO: 15411 - DNA, 25 bp, Homo sapiens
ccagggacggggaggaaagacgacg

SEQ ID NO: 15412 - DNA, 25 bp, Homo sapiens
cagggacggggaggaaagacgacga

SEQ ID NO: 15413 - DNA, 25 bp, Homo sapiens
agggacggggaggaaagacgacgat

SEQ ID NO: 15414 - DNA, 25 bp, Homo sapiens
gggacggggaggaaagacgacgatg

SEQ ID NO: 15415 - DNA, 25 bp, Homo sapiens
ggacggggaggaaagacgacgatgt

SEQ ID NO: 15416 - DNA, 25 bp, Homo sapiens
gacggggaggaaagacgacgatgtt

SEQ ID NO: 15417 - DNA, 25 bp, Homo sapiens
acggggaggaaagacgacgatgttg

SEQ ID NO: 15418 - DNA, 25 bp, Homo sapiens
cggggaggaaagacgacgatgttgc

SEQ ID NO: 15419 - DNA, 25 bp, Homo sapiens
ggggaggaaagacgacgatgttgcg

SEQ ID NO: 15420 - DNA, 25 bp, Homo sapiens
gggaggaaagacgacgatgttgcga

SEQ ID NO: 15421 - DNA, 25 bp, Homo sapiens
ggaggaaagacgacgatgttgcgag

SEQ ID NO: 15422 - DNA, 25 bp, Homo sapiens
gaggaaagacgacgatgttgcgagc

SEQ ID NO: 15423 - DNA, 25 bp, Homo sapiens
aggaaagacgacgatgttgcgagca

SEQ ID NO: 15424 - DNA, 25 bp, Homo sapiens
ggaaagacgacgatgttgcgagcat

SEQ ID NO: 15425 - DNA, 25 bp, Homo sapiens
gaaagacgacgatgttgcgagcata

SEQ ID NO: 15426 - DNA, 25 bp, Homo sapiens
aaagacgacgatgttgcgagcataa

SEQ ID NO: 15427 - DNA, 25 bp, Homo sapiens
aagacgacgatgttgcgagcataat

SEQ ID NO: 15428 - DNA, 25 bp, Homo sapiens
agacgacgatgttgcgagcataatg

SEQ ID NO: 15429 - DNA, 25 bp, Homo sapiens
gacgacgatgttgcgagcataatga

SEQ ID NO: 15430 - DNA, 25 bp, Homo sapiens
acgacgatgttgcgagcataatgaa

SEQ ID NO: 15431 - DNA, 25 bp, Homo sapiens
cgacgatgttgcgagcataatgaag

SEQ ID NO: 15432 - DNA, 25 bp, Homo sapiens
gacgatgttgcgagcataatgaaga

SEQ ID NO: 15433 - DNA, 25 bp, Homo sapiens
acgatgttgcgagcataatgaagaa

SEQ ID NO: 15434 - DNA, 25 bp, Homo sapiens
cgatgttgcgagcataatgaagaaa

SEQ ID NO: 15435 - DNA, 25 bp, Homo sapiens
gatgttgcgagcataatgaagaaat

SEQ ID NO: 15436 - DNA, 25 bp, Homo sapiens
atgttgcgagcataatgaagaaata

SEQ ID NO: 15437 - DNA, 25 bp, Homo sapiens
tgttgcgagcataatgaagaaatac

SEQ ID NO: 15438 - DNA, 25 bp, Homo sapiens
gttgcgagcataatgaagaaatacc

SEQ ID NO: 15439 - DNA, 25 bp, Homo sapiens
ttgcgagcataatgaagaaatacct

SEQ ID NO: 15440 - DNA, 25 bp, Homo sapiens
tgcgagcataatgaagaaatacctc

SEQ ID NO: 15441 - DNA, 25 bp, Homo sapiens
gcgagcataatgaagaaatacctcc

SEQ ID NO: 15442 - DNA, 25 bp, Homo sapiens
cgagcataatgaagaaatacctcca

SEQ ID NO: 15443 - DNA, 25 bp, Homo sapiens
gagcataatgaagaaatacctccag

SEQ ID NO: 15444 - DNA, 25 bp, Homo sapiens
agcataatgaagaaatacctccaga

SEQ ID NO: 15445 - DNA, 25 bp, Homo sapiens
gcataatgaagaaatacctccagaa

SEQ ID NO: 15446 - DNA, 25 bp, Homo sapiens
cataatgaagaaatacctccagaag

SEQ ID NO: 15447 - DNA, 25 bp, Homo sapiens
ataatgaagaaatacctccagaagt

SEQ ID NO: 15448 - DNA, 25 bp, Homo sapiens
taatgaagaaatacctccagaagta

SEQ ID NO: 15449 - DNA, 25 bp, Homo sapiens
aatgaagaaatacctccagaagtag

SEQ ID NO: 15450 - DNA, 25 bp, Homo sapiens
atgaagaaatacctccagaagtagg

SEQ ID NO: 15451 - DNA, 25 bp, Homo sapiens
tgaagaaatacctccagaagtagga

SEQ ID NO: 15452 - DNA, 25 bp, Homo sapiens
gaagaaatacctccagaagtaggaa

SEQ ID NO: 15453 - DNA, 25 bp, Homo sapiens
aagaaatacctccagaagtaggaac

SEQ ID NO: 15454 - DNA, 25 bp, Homo sapiens
agaaatacctccagaagtaggaacc

SEQ ID NO: 15455 - DNA, 25 bp, Homo sapiens
gaaatacctccagaagtaggaacca

SEQ ID NO: 15456 - DNA, 25 bp, Homo sapiens
aaatacctccagaagtaggaaccag

SEQ ID NO: 15457 - DNA, 25 bp, Homo sapiens
aatacctccagaagtaggaaccagt

SEQ ID NO: 15458 - DNA, 25 bp, Homo sapiens
atacctccagaagtaggaaccagtt

SEQ ID NO: 15459 - DNA, 25 bp, Homo sapiens
tacctccagaagtaggaaccagttc

SEQ ID NO: 15460 - DNA, 25 bp, Homo sapiens
acctccagaagtaggaaccagttca

SEQ ID NO: 15461 - DNA, 25 bp, Homo sapiens
cctccagaagtaggaaccagttcag

SEQ ID NO: 15462 - DNA, 25 bp, Homo sapiens
ctccagaagtaggaaccagttcagc

SEQ ID NO: 15463 - DNA, 25 bp, Homo sapiens
tccagaagtaggaaccagttcagcc

SEQ ID NO: 15464 - DNA, 25 bp, Homo sapiens
ccagaagtaggaaccagttcagcct

SEQ ID NO: 15465 - DNA, 25 bp, Homo sapiens
cagaagtaggaaccagttcagcctc

SEQ ID NO: 15466 - DNA, 25 bp, Homo sapiens
agaagtaggaaccagttcagcctcc

SEQ ID NO: 15467 - DNA, 25 bp, Homo sapiens
gaagtaggaaccagttcagcctcct

SEQ ID NO: 15468 - DNA, 25 bp, Homo sapiens
aagtaggaaccagttcagcctcctt

SEQ ID NO: 15469 - DNA, 25 bp, Homo sapiens
agtaggaaccagttcagcctccttg

SEQ ID NO: 15470 - DNA, 25 bp, Homo sapiens
gtaggaaccagttcagcctccttga

SEQ ID NO: 15471 - DNA, 25 bp, Homo sapiens
taggaaccagttcagcctccttgaa

SEQ ID NO: 15472 - DNA, 25 bp, Homo sapiens
aggaaccagttcagcctccttgaag

SEQ ID NO: 15473 - DNA, 25 bp, Homo sapiens
ggaaccagttcagcctccttgaagc

SEQ ID NO: 15474 - DNA, 25 bp, Homo sapiens
gaaccagttcagcctccttgaagct

SEQ ID NO: 15475 - DNA, 25 bp, Homo sapiens
aaccagttcagcctccttgaagctg

SEQ ID NO: 15476 - DNA, 25 bp, Homo sapiens
accagttcagcctccttgaagctgc

SEQ ID NO: 15477 - DNA, 25 bp, Homo sapiens
ccagttcagcctccttgaagctgcc

SEQ ID NO: 15478 - DNA, 25 bp, Homo sapiens
cagttcagcctccttgaagctgccc

SEQ ID NO: 15479 - DNA, 25 bp, Homo sapiens
agttcagcctccttgaagctgccct

SEQ ID NO: 15480 - DNA, 25 bp, Homo sapiens
gttcagcctccttgaagctgccctt

SEQ ID NO: 15481 - DNA, 25 bp, Homo sapiens
ttcagcctccttgaagctgcccttg

SEQ ID NO: 15482 - DNA, 25 bp, Homo sapiens
tcagcctccttgaagctgcccttga

SEQ ID NO: 15483 - DNA, 25 bp, Homo sapiens
cagcctccttgaagctgcccttgaa

SEQ ID NO: 15484 - DNA, 25 bp, Homo sapiens
agcctccttgaagctgcccttgaag

SEQ ID NO: 15485 - DNA, 25 bp, Homo sapiens
gcctccttgaagctgcccttgaaga

SEQ ID NO: 15486 - DNA, 25 bp, Homo sapiens
cctccttgaagctgcccttgaagac

SEQ ID NO: 15487 - DNA, 25 bp, Homo sapiens
ctccttgaagctgcccttgaagact

SEQ ID NO: 15488 - DNA, 25 bp, Homo sapiens
tccttgaagctgcccttgaagactt

SEQ ID NO: 15489 - DNA, 25 bp, Homo sapiens
ccttgaagctgcccttgaagacttc

SEQ ID NO: 15490 - DNA, 25 bp, Homo sapiens
cttgaagctgcccttgaagacttcc

SEQ ID NO: 15491 - DNA, 25 bp, Homo sapiens
ttgaagctgcccttgaagacttccc

SEQ ID NO: 15492 - DNA, 25 bp, Homo sapiens
tgaagctgcccttgaagacttcccg

SEQ ID NO: 15493 - DNA, 25 bp, Homo sapiens
gaagctgcccttgaagacttcccga

SEQ ID NO: 15494 - DNA, 25 bp, Homo sapiens
aagctgcccttgaagacttcccgac

SEQ ID NO: 15495 - DNA, 25 bp, Homo sapiens
agctgcccttgaagacttcccgact

SEQ ID NO: 15496 - DNA, 25 bp, Homo sapiens
gctgcccttgaagacttcccgactc

SEQ ID NO: 15497 - DNA, 25 bp, Homo sapiens
ctgcccttgaagacttcccgactct

SEQ ID NO: 15498 - DNA, 25 bp, Homo sapiens
tgcccttgaagacttcccgactcta

SEQ ID NO: 15499 - DNA, 25 bp, Homo sapiens
gcccttgaagacttcccgactctac

SEQ ID NO: 15500 - DNA, 25 bp, Homo sapiens
cccttgaagacttcccgactctaca

SEQ ID NO: 15501 - DNA, 25 bp, Homo sapiens
ccttgaagacttcccgactctacaa

SEQ ID NO: 15502 - DNA, 25 bp, Homo sapiens
cttgaagacttcccgactctacaat

SEQ ID NO: 15503 - DNA, 25 bp, Homo sapiens
ttgaagacttcccgactctacaata

SEQ ID NO: 15504 - DNA, 25 bp, Homo sapiens
tgaagacttcccgactctacaataa

SEQ ID NO: 15505 - DNA, 25 bp, Homo sapiens
gaagacttcccgactctacaataac

SEQ ID NO: 15506 - DNA, 25 bp, Homo sapiens
aagacttcccgactctacaataact

SEQ ID NO: 15507 - DNA, 25 bp, Homo sapiens
agacttcccgactctacaataactt

SEQ ID NO: 15508 - DNA, 25 bp, Homo sapiens
gacttcccgactctacaataacttg

SEQ ID NO: 15509 - DNA, 25 bp, Homo sapiens
acttcccgactctacaataacttgg

SEQ ID NO: 15510 - DNA, 25 bp, Homo sapiens
cttcccgactctacaataacttgga

SEQ ID NO: 15511 - DNA, 25 bp, Homo sapiens
ttcccgactctacaataacttggag

SEQ ID NO: 15512 - DNA, 25 bp, Homo sapiens
tcccgactctacaataacttggaga

SEQ ID NO: 15513 - DNA, 25 bp, Homo sapiens
cccgactctacaataacttggagac

SEQ ID NO: 15514 - DNA, 25 bp, Homo sapiens
ccgactctacaataacttggagaca

SEQ ID NO: 15515 - DNA, 25 bp, Homo sapiens
cgactctacaataacttggagacag

SEQ ID NO: 15516 - DNA, 25 bp, Homo sapiens
gactctacaataacttggagacaga

SEQ ID NO: 15517 - DNA, 25 bp, Homo sapiens
actctacaataacttggagacagag

SEQ ID NO: 15518 - DNA, 25 bp, Homo sapiens
ctctacaataacttggagacagaga

SEQ ID NO: 15519 - DNA, 25 bp, Homo sapiens
tctacaataacttggagacagagag

SEQ ID NO: 15520 - DNA, 25 bp, Homo sapiens
ctacaataacttggagacagagaga

SEQ ID NO: 15521 - DNA, 25 bp, Homo sapiens
tacaataacttggagacagagagac

SEQ ID NO: 15522 - DNA, 25 bp, Homo sapiens
acaataacttggagacagagagact

SEQ ID NO: 15523 - DNA, 25 bp, Homo sapiens
caataacttggagacagagagactg

SEQ ID NO: 15524 - DNA, 25 bp, Homo sapiens
aataacttggagacagagagactgg

SEQ ID NO: 15525 - DNA, 25 bp, Homo sapiens
ataacttggagacagagagactggc

SEQ ID NO: 15526 - DNA, 25 bp, Homo sapiens
taacttggagacagagagactggcc

SEQ ID NO: 15527 - DNA, 25 bp, Homo sapiens
aacttggagacagagagactggcca

SEQ ID NO: 15528 - DNA, 25 bp, Homo sapiens
acttggagacagagagactggccag

SEQ ID NO: 15529 - DNA, 25 bp, Homo sapiens
cttggagacagagagactggccagg

SEQ ID NO: 15530 - DNA, 25 bp, Homo sapiens
ttggagacagagagactggccaggc

SEQ ID NO: 15531 - DNA, 25 bp, Homo sapiens
tggagacagagagactggccaggcc

SEQ ID NO: 15532 - DNA, 25 bp, Homo sapiens
ggagacagagagactggccaggcct

SEQ ID NO: 15533 - DNA, 25 bp, Homo sapiens
gagacagagagactggccaggcctc

SEQ ID NO: 15534 - DNA, 25 bp, Homo sapiens
agacagagagactggccaggcctcc

SEQ ID NO: 15535 - DNA, 25 bp, Homo sapiens
gacagagagactggccaggcctccc

SEQ ID NO: 15536 - DNA, 25 bp, Homo sapiens
acagagagactggccaggcctcccc

SEQ ID NO: 15537 - DNA, 25 bp, Homo sapiens
cagagagactggccaggcctccccg

SEQ ID NO: 15538 - DNA, 25 bp, Homo sapiens
agagagactggccaggcctccccgg

SEQ ID NO: 15539 - DNA, 25 bp, Homo sapiens
gagagactggccaggcctccccggt

SEQ ID NO: 15540 - DNA, 25 bp, Homo sapiens
agagactggccaggcctccccggtg

SEQ ID NO: 15541 - DNA, 25 bp, Homo sapiens
gagactggccaggcctccccggtgg

SEQ ID NO: 15542 - DNA, 25 bp, Homo sapiens
agactggccaggcctccccggtggc

SEQ ID NO: 15543 - DNA, 25 bp, Homo sapiens
gactggccaggcctccccggtggcc

SEQ ID NO: 15544 - DNA, 25 bp, Homo sapiens
actggccaggcctccccggtggcca

SEQ ID NO: 15545 - DNA, 25 bp, Homo sapiens
ctggccaggcctccccggtggccag

SEQ ID NO: 15546 - DNA, 25 bp, Homo sapiens
tggccaggcctccccggtggccaga

SEQ ID NO: 15547 - DNA, 25 bp, Homo sapiens
ggccaggcctccccggtggccagag

SEQ ID NO: 15548 - DNA, 25 bp, Homo sapiens
gccaggcctccccggtggccagagc

SEQ ID NO: 15549 - DNA, 25 bp, Homo sapiens
ccaggcctccccggtggccagagcc

SEQ ID NO: 15550 - DNA, 25 bp, Homo sapiens
caggcctccccggtggccagagcca

SEQ ID NO: 15551 - DNA, 25 bp, Homo sapiens
aggcctccccggtggccagagccag

SEQ ID NO: 15552 - DNA, 25 bp, Homo sapiens
ggcctccccggtggccagagccagc

SEQ ID NO: 15553 - DNA, 25 bp, Homo sapiens
gcctccccggtggccagagccagcc

SEQ ID NO: 15554 - DNA, 25 bp, Homo sapiens
cctccccggtggccagagccagcca

SEQ ID NO: 15555 - DNA, 25 bp, Homo sapiens
ctccccggtggccagagccagccag

SEQ ID NO: 15556 - DNA, 25 bp, Homo sapiens
tccccggtggccagagccagccagc

SEQ ID NO: 15557 - DNA, 25 bp, Homo sapiens
ccccggtggccagagccagccagca

SEQ ID NO: 15558 - DNA, 25 bp, Homo sapiens
cccggtggccagagccagccagcat

SEQ ID NO: 15559 - DNA, 25 bp, Homo sapiens
ccggtggccagagccagccagcatg

SEQ ID NO: 15560 - DNA, 25 bp, Homo sapiens
cggtggccagagccagccagcatgg

SEQ ID NO: 15561 - DNA, 25 bp, Homo sapiens
ggtggccagagccagccagcatggc

SEQ ID NO: 15562 - DNA, 25 bp, Homo sapiens
gtggccagagccagccagcatggcc

SEQ ID NO: 15563 - DNA, 25 bp, Homo sapiens
tggccagagccagccagcatggcca

SEQ ID NO: 15564 - DNA, 25 bp, Homo sapiens
ggccagagccagccagcatggccac

SEQ ID NO: 15565 - DNA, 25 bp, Homo sapiens
gccagagccagccagcatggccacc

SEQ ID NO: 15566 - DNA, 25 bp, Homo sapiens
ccagagccagccagcatggccaccc

SEQ ID NO: 15567 - DNA, 25 bp, Homo sapiens
cagagccagccagcatggccaccct

SEQ ID NO: 15568 - DNA, 25 bp, Homo sapiens
agagccagccagcatggccaccctc

SEQ ID NO: 15569 - DNA, 25 bp, Homo sapiens
gagccagccagcatggccaccctca

SEQ ID NO: 15570 - DNA, 25 bp, Homo sapiens
agccagccagcatggccaccctcaa

SEQ ID NO: 15571 - DNA, 25 bp, Homo sapiens
gccagccagcatggccaccctcaag

SEQ ID NO: 15572 - DNA, 25 bp, Homo sapiens
ccagccagcatggccaccctcaaga

SEQ ID NO: 15573 - DNA, 25 bp, Homo sapiens
cagccagcatggccaccctcaagag

SEQ ID NO: 15574 - DNA, 25 bp, Homo sapiens
agccagcatggccaccctcaagagg

SEQ ID NO: 15575 - DNA, 25 bp, Homo sapiens
gccagcatggccaccctcaagaggc

SEQ ID NO: 15576 - DNA, 25 bp, Homo sapiens
ccagcatggccaccctcaagaggcg

SEQ ID NO: 15577 - DNA, 25 bp, Homo sapiens
cagcatggccaccctcaagaggcga

SEQ ID NO: 15578 - DNA, 25 bp, Homo sapiens
agcatggccaccctcaagaggcgag

SEQ ID NO: 15579 - DNA, 25 bp, Homo sapiens
gcatggccaccctcaagaggcgaga

SEQ ID NO: 15580 - DNA, 25 bp, Homo sapiens
catggccaccctcaagaggcgagat

SEQ ID NO: 15581 - DNA, 25 bp, Homo sapiens
atggccaccctcaagaggcgagatg

SEQ ID NO: 15582 - DNA, 25 bp, Homo sapiens
tggccaccctcaagaggcgagatga

SEQ ID NO: 15583 - DNA, 25 bp, Homo sapiens
ggccaccctcaagaggcgagatgag

SEQ ID NO: 15584 - DNA, 25 bp, Homo sapiens
gccaccctcaagaggcgagatgagc

SEQ ID NO: 15585 - DNA, 25 bp, Homo sapiens
ccaccctcaagaggcgagatgagcc

SEQ ID NO: 15586 - DNA, 25 bp, Homo sapiens
caccctcaagaggcgagatgagccc

SEQ ID NO: 15587 - DNA, 25 bp, Homo sapiens
accctcaagaggcgagatgagccca

SEQ ID NO: 15588 - DNA, 25 bp, Homo sapiens
ccctcaagaggcgagatgagcccac

SEQ ID NO: 15589 - DNA, 25 bp, Homo sapiens
cctcaagaggcgagatgagcccaca

SEQ ID NO: 15590 - DNA, 25 bp, Homo sapiens
ctcaagaggcgagatgagcccacag

SEQ ID NO: 15591 - DNA, 25 bp, Homo sapiens
tcaagaggcgagatgagcccacaga

SEQ ID NO: 15592 - DNA, 25 bp, Homo sapiens
caagaggcgagatgagcccacagag

SEQ ID NO: 15593 - DNA, 25 bp, Homo sapiens
aagaggcgagatgagcccacagagg

SEQ ID NO: 15594 - DNA, 25 bp, Homo sapiens
agaggcgagatgagcccacagaggc

SEQ ID NO: 15595 - DNA, 25 bp, Homo sapiens
gaggcgagatgagcccacagaggca

SEQ ID NO: 15596 - DNA, 25 bp, Homo sapiens
aggcgagatgagcccacagaggcat

SEQ ID NO: 15597 - DNA, 25 bp, Homo sapiens
ggcgagatgagcccacagaggcata

SEQ ID NO: 15598 - DNA, 25 bp, Homo sapiens
gcgagatgagcccacagaggcatat

SEQ ID NO: 15599 - DNA, 25 bp, Homo sapiens
cgagatgagcccacagaggcatatc

SEQ ID NO: 15600 - DNA, 25 bp, Homo sapiens
gagatgagcccacagaggcatatcc

SEQ ID NO: 15601 - DNA, 25 bp, Homo sapiens
agatgagcccacagaggcatatcct

SEQ ID NO: 15602 - DNA, 25 bp, Homo sapiens
gatgagcccacagaggcatatcctg

SEQ ID NO: 15603 - DNA, 25 bp, Homo sapiens
atgagcccacagaggcatatcctgc

SEQ ID NO: 15604 - DNA, 25 bp, Homo sapiens
tgagcccacagaggcatatcctgcg

SEQ ID NO: 15605 - DNA, 25 bp, Homo sapiens
gagcccacagaggcatatcctgcgg

SEQ ID NO: 15606 - DNA, 25 bp, Homo sapiens
agcccacagaggcatatcctgcggg

SEQ ID NO: 15607 - DNA, 25 bp, Homo sapiens
gcccacagaggcatatcctgcgggg

SEQ ID NO: 15608 - DNA, 25 bp, Homo sapiens
cccacagaggcatatcctgcgggga

SEQ ID NO: 15609 - DNA, 25 bp, Homo sapiens
ccacagaggcatatcctgcggggat

SEQ ID NO: 15610 - DNA, 25 bp, Homo sapiens
cacagaggcatatcctgcggggatg

SEQ ID NO: 15611 - DNA, 25 bp, Homo sapiens
acagaggcatatcctgcggggatgc

SEQ ID NO: 15612 - DNA, 25 bp, Homo sapiens
cagaggcatatcctgcggggatgct

SEQ ID NO: 15613 - DNA, 25 bp, Homo sapiens
agaggcatatcctgcggggatgctg

SEQ ID NO: 15614 - DNA, 25 bp, Homo sapiens
gaggcatatcctgcggggatgctgg

SEQ ID NO: 15615 - DNA, 25 bp, Homo sapiens
aggcatatcctgcggggatgctggg

SEQ ID NO: 15616 - DNA, 25 bp, Homo sapiens
ggcatatcctgcggggatgctgggc

SEQ ID NO: 15617 - DNA, 25 bp, Homo sapiens
gcatatcctgcggggatgctgggct

SEQ ID NO: 15618 - DNA, 25 bp, Homo sapiens
catatcctgcggggatgctgggctc

SEQ ID NO: 15619 - DNA, 25 bp, Homo sapiens
atatcctgcggggatgctgggctcc

SEQ ID NO: 15620 - DNA, 25 bp, Homo sapiens
tatcctgcggggatgctgggctccc

SEQ ID NO: 15621 - DNA, 25 bp, Homo sapiens
atcctgcggggatgctgggctccca

SEQ ID NO: 15622 - DNA, 25 bp, Homo sapiens
tcctgcggggatgctgggctcccag

SEQ ID NO: 15623 - DNA, 25 bp, Homo sapiens
cctgcggggatgctgggctcccagt

SEQ ID NO: 15624 - DNA, 25 bp, Homo sapiens
ctgcggggatgctgggctcccagtg

SEQ ID NO: 15625 - DNA, 25 bp, Homo sapiens
tgcggggatgctgggctcccagtgt

SEQ ID NO: 15626 - DNA, 25 bp, Homo sapiens
gcggggatgctgggctcccagtgtg

SEQ ID NO: 15627 - DNA, 25 bp, Homo sapiens
cggggatgctgggctcccagtgtgg

SEQ ID NO: 15628 - DNA, 25 bp, Homo sapiens
ggggatgctgggctcccagtgtggt

SEQ ID NO: 15629 - DNA, 25 bp, Homo sapiens
gggatgctgggctcccagtgtggtt

SEQ ID NO: 15630 - DNA, 25 bp, Homo sapiens
ggatgctgggctcccagtgtggttg

SEQ ID NO: 15631 - DNA, 25 bp, Homo sapiens
gatgctgggctcccagtgtggttgg

SEQ ID NO: 15632 - DNA, 25 bp, Homo sapiens
atgctgggctcccagtgtggttggc

SEQ ID NO: 15633 - DNA, 25 bp, Homo sapiens
tgctgggctcccagtgtggttggcc

SEQ ID NO: 15634 - DNA, 25 bp, Homo sapiens
gctgggctcccagtgtggttggcct

SEQ ID NO: 15635 - DNA, 25 bp, Homo sapiens
ctgggctcccagtgtggttggcctg

SEQ ID NO: 15636 - DNA, 25 bp, Homo sapiens
tgggctcccagtgtggttggcctga

SEQ ID NO: 15637 - DNA, 25 bp, Homo sapiens
gggctcccagtgtggttggcctgaa

SEQ ID NO: 15638 - DNA, 25 bp, Homo sapiens
ggctcccagtgtggttggcctgaac

SEQ ID NO: 15639 - DNA, 25 bp, Homo sapiens
gctcccagtgtggttggcctgaaca

SEQ ID NO: 15640 - DNA, 25 bp, Homo sapiens
ctcccagtgtggttggcctgaacaa

SEQ ID NO: 15641 - DNA, 25 bp, Homo sapiens
tcccagtgtggttggcctgaacaaa

SEQ ID NO: 15642 - DNA, 25 bp, Homo sapiens
cccagtgtggttggcctgaacaaaa

SEQ ID NO: 15643 - DNA, 25 bp, Homo sapiens
ccagtgtggttggcctgaacaaaat

SEQ ID NO: 15644 - DNA, 25 bp, Homo sapiens
cagtgtggttggcctgaacaaaata

SEQ ID NO: 15645 - DNA, 25 bp, Homo sapiens
agtgtggttggcctgaacaaaataa

SEQ ID NO: 15646 - DNA, 25 bp, Homo sapiens
gtgtggttggcctgaacaaaataaa

SEQ ID NO: 15647 - DNA, 25 bp, Homo sapiens
tgtggttggcctgaacaaaataaag

SEQ ID NO: 15648 - DNA, 25 bp, Homo sapiens
gtggttggcctgaacaaaataaagt

SEQ ID NO: 15649 - DNA, 25 bp, Homo sapiens
tggttggcctgaacaaaataaagtg

SEQ ID NO: 15650 - DNA, 25 bp, Homo sapiens
ggttggcctgaacaaaataaagtgt

SEQ ID NO: 15651 - DNA, 25 bp, Homo sapiens
gttggcctgaacaaaataaagtgtt

SEQ ID NO: 15652 - DNA, 25 bp, Homo sapiens
ttggcctgaacaaaataaagtgttg

SEQ ID NO: 15653 - DNA, 25 bp, Homo sapiens
tggcctgaacaaaataaagtgttga

SEQ ID NO: 15654 - DNA, 25 bp, Homo sapiens
ggcctgaacaaaataaagtgttgac

SEQ ID NO: 15655 - DNA, 25 bp, Homo sapiens
gcctgaacaaaataaagtgttgact

SEQ ID NO: 15656 - DNA, 25 bp, Homo sapiens
cctgaacaaaataaagtgttgactc

SEQ ID NO: 15657 - DNA, 25 bp, Homo sapiens
ctgaacaaaataaagtgttgactcc

SEQ ID NO: 15658 - DNA, 25 bp, Homo sapiens
tgaacaaaataaagtgttgactcct

SEQ ID NO: 15659 - DNA, 25 bp, Homo sapiens
gaacaaaataaagtgttgactcctg

SEQ ID NO: 15660 - DNA, 25 bp, Homo sapiens
aacaaaataaagtgttgactcctgg

SEQ ID NO: 15661 - DNA, 25 bp, Homo sapiens
acaaaataaagtgttgactcctggg

SEQ ID NO: 15662 - DNA, 25 bp, Homo sapiens
caaaataaagtgttgactcctgggc

SEQ ID NO: 15663 - DNA, 25 bp, Homo sapiens
aaaataaagtgttgactcctgggca

SEQ ID NO: 15664 - DNA, 60 bp, Homo sapiens
cacccggggagacgtcttagacagtcgtggttcctgtgatctgtgtcctctttgcagaag

SEQ ID NO: 15665 - DNA, 148 bp, Homo sapiens
ttctgtgtccatctcatgtgctgcgtgtgtctgtaaagcctcattccgtgctgtctggcaggaagctccatctcatctcatcatctcacggccctggcactgcctcagcatggccatctcatcacgcctcgccctgtgggagcagaag

SEQ ID NO: 15666 - DNA, 159 bp, Homo sapiens
attcgggaagaggacaagagccctccaccatcctcgccccctcctcttttctctgtcatcccagggggcttcattaagcaactggtccgggggactgaaaaagaggccaaggaagcgagacagaggaagcagttagctgtcgcctctccagaacgagag

SEQ ID NO: 15667 - DNA, 1314 bp, Homo sapiens
atcccagaaatttccatcagccaacccaacagcaagtccagcagtggcaccagatctggaagccagcagatctctcaggacgaccagtcaagctctcctgggagctcagacattctgggcaaggagagcgaggggtcccgcagccccgaccctgagcagatgacaagcatcaatggtgagaaggcccaggagctgggctccagtgcgacaccaaccaaaaagactgtccccttcaagaggggcgtgaggaggggtgatgtgttgttgatggtggccaagctggacccggactcagccaagccagagaagactcatccccatgacgcccccccttgcaagacctctccccccgccacagatactggaaaggaaaagaaaggggagacctctaggactccttgtggctcccaggccagcaccgagatcttggccccgaaagctgagaagacccggactgggggtcttggggacccaggccaaggaactgtggcactgaaaaaaggcgaggagggtcaaagcatagtggggaaggggcttgggacccccaagaccacagagctgaaagaggctgagccccagggcaaagacaggcaggggaccaggccccaagcccaagggcccggcgagggggtgcgaccagggaaagcagagaaggagggagcagagcccacaaacacggtggaaaaggggaatgtctctaaggacgtagggagtgaagggaagcacgtaaggccccaaatccctgggagaaagtggggaggtttcctgggaagaaggagtaagtgggacggtccccagaataagaaggacaaagaaggggtgctcttaagtaaggcagagaagacaggtgagcctcagacccagatggagaagacaagccaagtgcagggcgagttgggggacgatctgagaatgggggagaaagcaggtgagcttcggagcacgactgggaaggcaggtgagtcctgggataagaaggaaaagatggggcaaccccagggtaagtccgggaacgcaggtgaagctcggagtcagacagagaagggctgtgaagccccaaaggaggtgagcacaatggtggagtcgccagcagctcctgggaagggaggctggccaggaagccgtgggcaggaagcagaggagccctgctcaagagcaggtgatggggctggtgccctggagacagagctggaaggacccagccagcctgctctggagaaggatgcagaaaggcctcggatacggaaggagaaccaagacgggccagccccgcaggaggagggcaaaggaggccagagcagagactcagaccag

SEQ ID NO: 15668 - DNA, 67 bp, Homo sapiens
gctcctgaggacagatggtatgaggcagagaaagtctggctggctcagaaggatggatttactcttg

SEQ ID NO: 15669 - DNA, 113 bp, Homo sapiens
ctacggtgctaaagccagatgagggaacagcagacctgccagcaggaagggtgagactttgcattgatgctgacaaaaccatcactgaggtggatgaggagcatgtccatcgg

SEQ ID NO: 15670 - DNA, 177 bp, Homo sapiens
gccaaccctcctgagctggaccaggtcgaggacctggcctctctcatcagtgtcaacgaatccagtgtcctgaacacgcttctgcagcgctacaaagctcagctgctgcacacctgcacagggcctgatctgattgtcctccagccccgggggccctcggtgccttctgcagggaag

SEQ ID NO: 15671 - DNA, 199 bp, Homo sapiens
gtgcccaagggccgccgggatggcctgcctgcccacattggctccatggcacagcgggcatactgggcgctgctgaaccagcggagagaccagagcattgtggccctgggccggagtggcgctgggaagaccacctgctgtgagcaggtcctggaacacctggtggggatggcaggcagtgtggatggcagggtctcag

SEQ ID NO: 15672 - DNA, 143 bp, Homo sapiens
tggagaagatccgagccaccttcactgtcctccgggccttcggctctgtgtccatggcccacagccgcagtgccacccggttctccatggtgatgtcgctggacttcaacgctacaggccgcatcacagctgctcagctccag

SEQ ID NO: 15673 - DNA, 101 bp, Homo sapiens
acaatgcttttggagaagagccgcgtggcacggcagccggaaggggaaagtaacttcctggttttctcccagatgctggctggattggacttggatctcag

SEQ ID NO: 15674 - DNA, 64 bp, Homo sapiens
gacggagctgaacctgcaccagatggcagatagcagctcctttggcatgggcgtgtggtccaag

SEQ ID NO: 15675 - DNA, 145 bp, Homo sapiens
cctgaagataaacagaaggcggcagctgcctttgcccagctccagggtgccatggagatgctgggcatctcagagagcgagcagcgggctgtttggcgggtcctggcagccatctaccacctgggcgcggcgggggcctgcaaag

SEQ ID NO: 15676 - DNA, 174 bp, Homo sapiens
tgggtcggaagcagttcatgaggtttgagtgggcaaactacgcagctgaggccctgggctgcgagtatgaggagctgaacacggccaccttcaagcaccaccttcgacagatcatccagcaaatgacgtttgggccaagccgatggggcctcgaggatgaggaaaccagctcag

SEQ ID NO: 15677 - DNA, 91 bp, Homo sapiens
ggctcaagatgacaggagtggactgtgtggaggggatggcctcgggcctgtaccaggaactctttgcggctgtggtctcactcatcaacag

SEQ ID NO: 15678 - DNA, 193 bp, Homo sapiens
atccttttcctcccaccatctctccatggcctccatcatggtggtggactctccaggcttccagaacccccggcaccagggcaaggaccgggcggccacctttgaggagctgtgccacaactacgcccatgagcgcctgcagctgctgttctaccagcggacctttgtctccacgctacagcgatatcaagag

SEQ ID NO: 15679 - DNA, 81 bp, Homo sapiens
gaaggtgttcctgtgcagtttgacctcccggacccctccccagggaccaccgtggctgttgtggatcaaaatccctctcag

SEQ ID NO: 15680 - DNA, 151 bp, Homo sapiens
caggtccgcttaccagctggaggaggtgcccaggatgccagaggccttttctgggtcttagatgaggaagtccatgtagagggctccagtgacagtgtggtgctcgagcgtctgtgtgctactttcgagaagaaaggagctgggactgaag

SEQ ID NO: 15681 - DNA, 160 bp, Homo sapiens
ggtcctctgccctgcggacctgtgagcagcccctccagtgtgagattttccaccagttgggatgggaccctgtgcggtacgacctcacgggctggctccacagagccaagcccaacctctcggccctggatgcaccccaggtcctgcaacagtcaaaaag

SEQ ID NO: 15682 - DNA, 184 bp, Homo sapiens
agaggagctgcggagtctattccaggcccgggccaagctgcctcctgtgtgccgggctgtggcaggcctggagggcacctcccagcaggccctgcagaggagccgcatggtgaggaggacctttgccagcagccttgccgcggtgaggaggaaagccccgtgctcccagatcaagctgcagatg

SEQ ID NO: 15683 - DNA, 223 bp, Homo sapiens
gatgcgctgaccagcatgatcaaaaggtcccggctgcactttatccactgcctggtaccaaaccctgtggtggaaagcaggagtgggcaggaatctccaccaccaccgcagcctggtagagacaagcctggggcaggtggacctctggccctggatatcccagcactgagggtccagcttgctgggttccacatcctggaggctctgcgtctgcataggacag

SEQ ID NO: 15684 - DNA, 110 bp, Homo sapiens
gctatgctgaccacatggggctcactcgcttccgccggcaattccaggtgctggacgctccactcctgaagaagctcatgtcgacctccgagggaatagatgaaaggaag

SEQ ID NO: 15685 - DNA, 66 bp, Homo sapiens
gccgtggaggagctcctggagaccctggatctggaaaagaaggcggtggctgtggggcacagccaa

SEQ ID NO: 15686 - DNA, 129 bp, Homo sapiens
gtttttctcaaggcaggtgtgatctccaggcttgagaagcagcgagagaagctggtatctcagagcatcgttctcttccaggcggcttgcaagggctttctgtctcgccaggaattcaagaagctgaag

SEQ ID NO: 15687 - DNA, 144 bp, Homo sapiens
attcgccgactggctgcacagtgcatccagaagaatgtggctgtgttcctcgcagtcaaggactggccatggtggcagctgcttggttccctccagcctctacttagtgccaccattggaactgagcagctccgagccaaggag

SEQ ID NO: 15688 - DNA, 90 bp, Homo sapiens
gaggagcttacaacgctaagacggaagctagaaaaatcagagaagttgcggaatgaactccggcagaacacagatctgctagaaagcaag

SEQ ID NO: 15689 - DNA, 120 bp, Homo sapiens
attgctgacttgacctctgaccttgccgatgagcgcttcaaaggtgatgtggcctgccaggtgctggagagtgagcgggcagagcggctacaggccttccgggaggtccaggagctcaag

SEQ ID NO: 15690 - DNA, 109 bp, Homo sapiens
agcaagcatgaacaagtccagaaaaaactgggagatgtgaataaacagttggaagaagcccagcagaaaattcagttgaatgacttggaaagggatcccactggaggag

SEQ ID NO: 15691 - DNA, 125 bp, Homo sapiens
cagacgagtggcagatgcgcttcgactgtgctcagatggagaacgagttcctcagaaagcgtctgcagcaatgcgaggagaggctggactcggagctgacagccaggaaagagctggagcaaaag

SEQ ID NO: 15692 - DNA, 155 bp, Homo sapiens
cttggggagttgcaaagtgcttatgacggggccaagaagatggctcaccaactgaagaggaagtgccaccatcttacctgtgaccttgaggatacctgcgtcctgctagagaaccaacaaagtcgaaaccatgagctggagaagaagcagaagaa

SEQ ID NO: 15693 - DNA, 124 bp, Homo sapiens
gtttgacctgcagctggcccaggccctaggtgagtcagtgtttgagaagggtctccgtgagaaagtgacccaggagaacaccagtgtccggtgggagctaggccagcttcagcagcagctgaag

SEQ ID NO: 15694 - DNA, 201 bp, Homo sapiens
caaaaggagcaggaagcctcacagctgaagcagcaggtggagatgctacaggaccataaacgggagctgctggggtcaccctctctgggggaaaattgcgttgctggcttgaaggagaggctctggaagttggaatccagcgcccttgagcaacagaaaatccagagccagcaggaaaacaccatcaagcagctggagcag

SEQ ID NO: 15695 - DNA, 111 bp, Homo sapiens
ctccgccagcggtttgagctggagatcgagcggatgaagcagatgcaccagaaggaccgtgaggaccaggaggaggaactggaggatgtccgtcagtcctgccagaagcgg

SEQ ID NO: 15696 - DNA, 105 bp, Homo sapiens
cttcatcagctggaaatgcagctggagcaagagtatgaagagaagcagatggtcctccatgagaagcaagatttggaaggcttgatcggaaccctctgtgaccag

SEQ ID NO: 15697 - DNA, 153 bp, Homo sapiens
attggccatcgggactttgatgtggagaagcgacttcggagagacctcaggaggacacatgcactgttgtcagacgtgcagctccttctgggcaccatggaggatggcaagacatcagtcagcaaggaggagctggagaaagtgcacagccag

SEQ ID NO: 15698 - DNA, 114 bp, Homo sapiens
ctggagcagagtgaagccaagtgtgaggaggccttgaagacgcagaaggtgctcacagcggacctggagagcatgcacagcgagctggagaacatgacgcggaacaagagcctg

SEQ ID NO: 15699 - DNA, 117 bp, Homo sapiens
gtggatgagcagctgtacaggctgcagtttgagaaggcggacctcctgaagcgcatcgatgaggaccaggatgacctgaatgagctgatgcagaagcacaaggacctcattgctcag

SEQ ID NO: 15700 - DNA, 84 bp, Homo sapiens
tctgctgctgacattgggcagatccaagaactgcagctgcagctggaggaagccaagaaggagaagcacaagctacaagaacaa

SEQ ID NO: 15701 - DNA, 138 bp, Homo sapiens
ctgcaggtggctcagatgcgcatcgagtacctggaacagtccaccgtggatcgagccatcgtcagcaggcaggaggcggtcatctgtgacctagagaacaagacagagttccagaaggtgcagattaagagatttgag

SEQ ID NO: 15702 - DNA, 186 bp, Homo sapiens
gtcctggtgatccggcttcgggacagcctgatcaagatgggggaggagctttcacaggcggccacctccgagtcccagcagcgggagagcagccagtactaccagcggcgcctggaagagctgaaggccgacatggaagagctggtgcagcgggaggcagaggccagccggcggtgcatggagctg

SEQ ID NO: 15703 - DNA, 131 bp, Homo sapiens
gagaagtacgtggaggaacttgcagcagtgaggcaaaccctccagacagacctggagacatccattcggcggattgccgacctgcaggctgccttggaagaagtggcatccagtgacagtgatactgagag

SEQ ID NO: 15704 - DNA, 45 bp, Homo sapiens
tgtccagacggcagtggattgtggcagcagcggccgaaaagagat

SEQ ID NO: 15705 - DNA, 138 bp, Homo sapiens
ggataacgtctccatcctcagctcccagccagagggcagcctgcagtcctggttgagctgtactctgtccctggccacagatactatgaggactccttctcgacagtcagccaccagcagccgcatcctcagccccag

SEQ ID NO: 15706 - DNA, 1246 bp, Homo sapiens
gataaacgaagaggctggggacactgagaggacccagtcggcattggcactgagcagagcccggtccaccaatgtccacagcaagacctcaggagacaagcctgtttctccccactttgtccgccggcaaaagtactgtcattttggggacggcgaagtgcttgccgtccagagaaagtccacagagagattagaacctgcttcctctcccctggcttctcggagtacaaatacatccccgctgtcgagggaaaagctgcccagtccttcagcggccctctcggagttcgtggaagggctccggaggaagagagcccagagaggccaggggtccacgctgggcctagaggactggcccactctccccatttaccagacgactggggcctccacactaaggaggggcagggctggcagtgacgagggaaacctctcgctgagggttggggcaaagtcacccctggaaatcgaaggggccgctggtggtctcttgaggtccaccagcctcaaatgcatctcttcagacggtgttgggggcacaaccctactccccgaaaagtcgaaaacccaattcagttcctgcgagtccctcttagaatccagaccgagcatggggagaaaactgagctctccgaccacacccagggacatgctgttgtcgcccacactgcgtcctcggaggcggtgtctggagtcctctgtggacgatgcgggctgtccagaccttggaaaggagccgcttgttttccagaaccgccagtttgcccacctgatggaggaacctctaggcagtgacccattcagctggaaactcccaagcctcgactacgaacgcaagaccaaagtggacttcgatgacttcctcccagctatccggaagccccagacacctacctccttggctggatcagccaaaggtgggcaagacggttcacagcgttcaagcatccactttgaaacggaagaggctaaccgttcctttctctcggggatcaagaccattttgaagaagagcccggagcccaaggaggatcccgctcacctgtctgactcgtcctcatcctccggctccatcgtgtccttcaaaagtgctgacagcatcaaaagtcgaccaggaatcccacgacttgcgggtgacggtggcgagcgaacgtcccccgagcggagagagccagggacggggaggaaagacgacgatgttgcgagcataatgaagaaatacctccagaagtaggaaccagttcag

SEQ ID NO: 15707 - DNA, 202 bp, Homo sapiens
cctccttgaagctgcccttgaagacttcccgactctacaataacttggagacagagagactggccaggcctccccggtggccagagccagccagcatggccaccctcaagaggcgagatgagcccacagaggcatatcctgcggggatgctgggctcccagtgtggttggcctgaacaaaataaagtgttgactcctgggca

SEQ ID NO: 15708 - DNA, 500 bp, Homo sapiens
tcaacggccaccccgggctgccgtctcctggccagacctggagctcacaagctaattttagaaatgactggtcgactcagctgctgctatcacattggcccagaaggagggtggggggaggacgggtcggggaggggcagtaaggggaagggatgtgtgtcggtgtgtgtggagagggtgctccttcgctcctgctttcccggctcggtggggtcccttcgcggccacccggggagacgtcttagacagtcgtggttcctgtgatctgtgtcctctttgcagaaggtactattgggctgggttttagacgggcaccttgcgagcggatcggcgagttttaattttccggaatgcgctgctgggggctgcggtggcaggcctccggtcttttggtctattttaggcctttctggtgttgagagcttccgaggcctgattcctttgcctgttgcccgtgctgctcactttgaaaacaagagtgtttcggtggaaggatttga

SEQ ID NO: 15709 - DNA, 500 bp, Homo sapiens
tgcctgaccatcctccttgcagaggtagctgacagtgtctgtacctgactgtgcccattcccccatgtggtcttggtttatggcgttggtgggggtgggagtagggctgtgcccatgagctaacctgtctctctcttctctccccactgtgtccctgtgtgtcagttctgtgtccatctcatgtgctgcgtgtgtctgtaaagcctcattccgtgctgtctggcaggaagctccatctcatctcatcatctcacggccctggcactgcctcagcatggccatctcatcacgcctcgccctgtgggagcagaaggaaagtgacactcatggctggggctgcagccatctgcagggactgactcgaccctcgggagacaagtccgacctttcccaccttgagtggggagtctgacatccagccctcctagtagcatgtgcaatcccaccttcaaccttctcccagccagctcggttagccttggcctttccaacccagctgg

SEQ ID NO: 15710 - DNA, 500 bp, Homo sapiens
acccccctgagtcgtgctgggcctcacctgcttggctgtggcttctcatacatgggcttggtcatgtatgtctcctccgccccctcccaggctccatcacaaactttgaagggcagcttgctcctgctggttgactcactgagctctctctttccttgcttctgcaaaacagattcgggaagaggacaagagccctccaccatcctcgccccctcctcttttctctgtcatcccagggggcttcattaagcaactggtccgggggactgaaaaagaggccaaggaagcgagacagaggaagcagttagctgtcgcctctccagaacgagaggtaagtggttcctaagaaggaggaccgtatgcgtttccatacccatcattctgtcttgtgagcttcctctgagtcatttgtcatcctgcctttgctcctgctgtcctggttttgaggaatgtcctttattcaacttgatctattgagctcttatgtacccttcaaaacc

SEQ ID NO: 15711 - DNA, 500 bp, Homo sapiens
gtggctcccaggccagcaccgagatcttggccccgaaagctgagaagacccggactgggggtcttggggacccaggccaaggaactgtggcactgaaaaaaggcgaggagggtcaaagcatagtggggaaggggcttgggacccccaagaccacagagctgaaagaggctgagccccagggcaaagacaggcaggggaccaggccccaagcccaagggcccggcgagggggtgcgaccagggaaagcagagaaggagggagcagagcccacaaacacggtggaaaaggggaatgtctctaaggacgtagggagtgaagggaagcacgtaaggccccaaatccctgggagaaagtggggaggtttcctgggaagaaggagtaagtgggacggtccccagaataagaaggacaaagaaggggtgctcttaagtaaggcagagaagacaggtgagcctcagacccagatggagaagacaagccaagtgcagggcgagttgggg

SEQ ID NO: 15712 - DNA, 500 bp, Homo sapiens
ggagtcttgctctgtcacccaggctagatggtgcagtggtgtgatctcggctccacctcccgggtccgcaacgggaatctgcatttaaataagcacactccctctcctgttctcccccaggagattctggtttagatggctccagagcacactgtgagaaacccccgtgtaaggtagaagatgggcagcggtgccatttgctggtttaatttacgtgatgttggttctcaggctcctgaggacagatggtatgaggcagagaaagtctggctggctcagaaggatggatttactcttggtaagtaggggtgttagcacctttggagggtctgagtcttctcctgtgccccctactgctgccagccatatgttccaggtcctgattatactttggtggtcaggagggaagaggagcagtggagactgtctttcaaaggcatttgtgtcttgataatgagttatttacctactgtaactcactaatgcaacaagcatgcttt

SEQ ID NO: 15713 - DNA, 500 bp, Homo sapiens
gagtcagacttagcctgaccttaaaggatttggggtcacaactcagctccaagtgaatagaccccaaatggagacctgtcccaagccttctcccaagcttgctggcccggcttagagcctctcttatctcctgccctcgcctctttcccctcttcccctcccatctcctccccgttccccttctctctctgggatgtccaaccagctacggtgctaaagccagatgagggaacagcagacctgccagcaggaagggtgagactttggattgatgctgacaaaaccatcactgaggtggatgaggagcatgtccatcgggtgagtcccctgtcccgccgtcccccagcatgagtcccctgtcccacttcaccccagctccataccctccttccccagtcctgcaagagatttccttgttcctgactaccaataccattttggcttgatgccctggagggagttatagtgaagaaccccactgaactcattgctctactgga

SEQ ID NO: 15714 - DNA, 500 bp, Homo sapiens
tagggcttcattgctttccatccagagtccctgtgctctgttctggtctttggcacatagctctcaagaggagggcttagtgtgtgtttggttgcgggggggtggggtgggggcagggggccagaaggccagaaggccagaggagactctgtgtgatggtttcacaggccaaccctcctgagctggaccaggtcgaggacctggcctctctcatcagtgtcaacgaatccagtgtcctgaacacgcttctgcagcgctacaaagctcagctgctgcacacctgcacagggcctgatctgattgtcctccagccccgggggccctcggtgccttctgcagggaaggtgaggtgggaccattgtgggcagggctgaggggctgagggcaggggggcctggggggatccctctgcatctgaggtgacagtagaaccatcagagcccccagtcgacctgtctgcaagcagcatccttctcgcggcattgtggcatcctgtggca

SEQ ID NO: 15715 - DNA, 500 bp, Homo sapiens
gggagtcagggatctggaggcagatctggaggcagggacacagatctggaccctaggcctggggcggggcgctgtcttagaatgctccctaggcagtggctggatgggatggctgatacctgtgatcttcctgcaggtgcccaagggccgccgggatggcctgcctgcccacattggctccatggcacagcgggcatactgggcgctgctgaaccagcggagagaccagagcattgtggccctgggctggagtggcgctgggaagaccacctgctgtgagcaggtcctggaacacctggtggggatggcaggcagtgtggatggcagggtctcaggtatggtggtctctaggtgacatggagagttggggtcagcacggggagagttggaaggggatgctgagctgctttcttatattcattcagctagcattcactgagcaccagatatgtgcagaccccatgcttgctactgggcagggctatccctaggtcattggg

SEQ ID NO: 15716 - DNA, 500 bp, Homo sapiens
aatgtatgtggtttatagttgggttgggcagggagtgggtggcaggaagctcacaggaagcccaccgggggctgaggccaggatggggactggcccaagcaggggccgtggaaaaggtggacctgtgtgaggtggcagtggcagcacctgggccatcagtgacatgtggccccatgctgcccccaacagtggagaagatccgagccaccttcactgtcctccgggccttcggctctgtgtccatggcccacagccgcagtgccacccggttctccatggtgatgtcgctggacttcaacgctacaggccgcatcacagctgctcagctccaggtgaggcctctcgggggatgtgcaagggggcccttggggctgctgtgtctctaaccccgggactcagcagagcccacgcctccagctgggactctaggatgtgtctgaaatggtcatggcggtggctcaggcctgtaatcccagcactttgggaggctgaggtgggtg

SEQ ID NO: 15717 - DNA, 500 bp, Homo sapiens
gtgaagctgggaggcggagcttgcagtgagccgagatcacgccaccgcactccagcctgggcaacagagcgagactccgtctcaaaaaaaaaaaaaaaagagtggatcagagtggggcaccccaatggggcttctgggtagctgcacttcaggcatgtgcagatgtacccaaagcactgactgggtgcccctcttctctccctgcagacaatgcttttggagaagagccgcgtggcacggcagccggaaggggaaagtaacttcctggttttctcccagatgctggctggattggacttggatctcaggtgagcacttggggcaggaagagacagctgagggcagtgcgacaaagggcacatgttctttgggggcccagccttagcttctgcccagcactgagaggccgtgggacccagggattaggaacatggcgtccgattccagctgtctgggtacacgcagctcatgggctgggtgactttggtcacatgtcatcc

SEQ ID NO: 15718 - DNA, 500 bp, Homo sapiens
tacaaccctttctcctgggatttcctggcctttaggaagggccaagtgagggctgtgcgtgaggaatatttgggagattgaagatatcccagggcagagttagtggggccaaggccagggacagggacagcccctggggtgtccgggcagttgtgtggagcctcacactgtgacgaccacctgccctgccagggctggtgtggacagcccccctgactcctggttccttctgtgcttccaggacggagctgaacctgcaccagatggcagatagcagctcctttggcatgggcgtgtggtccaaggtaaggaggaggtccctcacgggtgggatgtgagtctgtgtctggggctagatgggagggtgatgagtcgccgtgcaacttgtctcttttggtactggggttcatagttggcaagggttggtcatgtggaagagttggcactgcctttgtagggtctcggcttattgggtaaagaagactcagacaaataaagga

SEQ ID NO: 15719 - DNA, 500 bp, Homo sapiens
cgcctgagtttgtctgtcagtactcctcagcttaattgtgggtaatttattgtggcaataaaatgacccccgcattccttcgagacggagctcagcttcaagttgtgagcttgtgttttctccatcgcgatggccttgttttcttcctctctccctttgcccgcagcctgaagataaacagaaggcggcagctgcctttgcccagctccagggtgccatggagatgctcggcatctcagagagcgagcagcgggctgtttggcgggtcctggcagccatctaccacctgggtgcggcgggggcctgcaaaggtacgtccttcctgccgggctcacctgggagggcagctgtctcctttggcaggtgcctgacaaggcccttctctcggagcggtgggaacagggtcaatctgtcaccttctatgtctctgggacttcccttggggaggctgctgaaactaggcgtcgtgaggaggacacagggctggcttttcaagcaaa

SEQ ID NO: 15720 - DNA, 500 bp, Homo sapiens
gcagttgtccaagctcccggctgaggaggctggcctggagattgggagggtgctgagattctccgaggtcctctcgggtgttcattcaccccatgcccaaggcctcactgccacgcctctgttttgtcccctttgcagtgggtcggaagcagttcatgaggtttgagtgggcaaactacgcagctgaggccctgggctgcgagtatgaggagctgaacacggccaccttcaagcaccaccttcgacagatcatccagcaaatgacgtttgggccaagccgatggggcctcgaggatgaggaaaccagctcaggtacatggctgctgcctctttgggtgagctgggcccccctctgggccagctcctggggatacaccagcattctttaacttttttatcaaagatttgttaagggcctatgctatgaaggcgtgtgttagatgcaggggaagccatcgtgggtggaaagggaccggtcaatgctaatgctcaaataacta

SEQ ID NO: 15721 - DNA, 500 bp, Homo sapiens
cactctggggtgaaggtagggcaggttacataggacgctgtaggccctgaaaggacacttagactttgtcctaagaacctggggaaataattttagcagtggagggatgtggcaagaaaagaaggattttctaaattgagtggtccctactgctctgcagtgatgtccttggccccaggcaagatccctaaccaagaatgctgattctgtcctctttcccagggctcaagatgacaggagtggactgtgtggaggggatggcctcgggcctgtaccaggaactctttgcggctgtggtctcactcatcaacaggtaacggggccttttcctaggcacacagttggcctcttgcaggtgcacagatgaattcacataccgggcagttgaacaaagtggcagtttttgagctggcgagagggtttctaaggtggacagtgctgggtttaacttctaccttggccacccactggctgtgaggtcggcaaatcagttcacttct

SEQ ID NO: 15722 - DNA, 500 bp, Homo sapiens
tttgaaaccagttctgctggaggcttggatcagtgtgctcctagattccatgccatctcagacattccacctctctcttctctccctagatccttttcctcccaccatctctccatggcctccatcatggtggtggactctccaggcttccagaacccccggcaccagggcaaggaccgggcggccacctttgaggagctgtgccacaactacgcccatgagcgcctgcagctgctgttctaccagcggacctttgtctccacgctacagcgatatcaagaggtatgcctgggctggagcagggctttcaccagagctccgtggatggtgtaaggtcagatgggaaggggtgggattcccattccccaggagcctgcagcttcaccctgtttggttcaccagagaacaaagccctttccccaggcctggctccccagacctctgttgctccctccacagcccagcctccccctgccaccttctgaaccccgcagcccaga

SEQ ID NO: 15723 - DNA, 500 bp, Homo sapiens
atgaatgtaccttataccactgaaatgtatacttaaaatgactaaaatggtaaattttctgctatgtatcttttgccaaaatttaaaaaaacgatttttttaaagggccaagaggtgatggaaatcctctccgctttttccttcttcagaagttttcttcccccttcagctcgctaaaagtgctaacttttaaatcctgttattttccaggaaggtgttcctgtgcagtttgacctcccggacccctccccagggaccaccgtggctgttgtggatcaaaatccctctcaggtaacacagggcccagccaatccaggctctcagatgccagttggccatattgaaatgctggtggatttgagtcttcagtctactagttgtcaatgccgtgtgcacctagagtcaccccgggatcattggcaacgtggatgcctgggacccaaccccagattctgtgtaaattgttctgagggtatggcctgaacagtggaaatttaagc

SEQ ID NO: 15724 - DNA, 500 bp, Homo sapiens
tgagagtctggggtgattgggagcatggttttgggtaggcacgttctgagtcctgacacttgggacttggatgctctcattccctatcggtgggaagagaagcccaagacaggcttctgatgggtatcagggcccttcagtgaatcctggttctcccagcaggtccgcttaccagctggaggaggtgcccaggatgccagaggccttttctgggtcttagatgaggaagtccatgtagagggctccagtgacagtgtggtgctcgagcgtctgtgtgctgctttcgagaagaaaggagctgggactgaaggtaaggaagcagggggctggggatggggcctgagtccagcctgggtattagaatctgttcttctctgctgcagggaaagccctgacaaggcctgcacagaggctccaacgtgcagaggtgaatgtgcatgagcctgtgtatgctttcattcattcaagtattcagtgaacgcattgagcagccactatgt

SEQ ID NO: 15725 - DNA, 500 bp, Homo sapiens
acacaaattcactacagcaggagaaatgtgggtgccttcgaccatgagcgttagctatctggaaacacgttaagatggatactgtgcgtttaagggatgccagctgattgcagagtgtcctcaacaggctccagcactcatgccaccatgtctgtttccagggtcctctgccctgcggacctgtgagcagcccctccagtgtgagattttccaccagttgggatgggaccctgtgcggtacgacctcacgggctggctccacagagccaagcccaacctctcggccctggatgcaccccaggtcctgcaccagtcaaaaaggtgagttgggtcagggttggggacggggatggagcattggaggcactgtgttttccttcccacctaaactaggcagtcactacaacacagtgtgggagggccagcccaggaatcccatccctccataatggagcaaagaaccataacttgaattggagcagtgcagtgtctccctgggg

SEQ ID NO: 15726 - DNA, 500 bp, Homo sapiens
aggggctgtgaatgaaggggagcagctgggacacatgactgtagaggaggctttaggaagccgaggagcaggaagcaagaaggcttgttccctttgccaccacccaggccaaggctttcccaagaacctcctaaagctcctctctcttttccctcctccccaccagagaggagctgcggagtctattccaggcccgggccaagctgcctcctgtgtgccgggctgtggcaggcctggagggcacctcccagcaggccctgcagaggagccgcatggtgaggaggacctttgccagcagccttgccgcggtgaggaggaaagccccgtgctcccagatcaagctgcagatggtgagtgggcaccctgtctcatggtgtcctggccttcactgcctccatcctcatctcctctgggctgagtcatgtgcctacatcatctctaacctccccagcaaggccagaggggcgagtgtcaccccacgctccacagaggaggaaatg

SEQ ID NO: 15727 - DNA, 500 bp, Homo sapiens
gagcacaaatcaggctgtaggtgggagctccttggtgtgggacataggggccccaaagatgctcaggttgggcttaatgaatatttggagagggtccagtcccctttctgtgtctctgtgagacaactggccctgacctccctctatttggtctaggatgcgctgaccagcatgatcaaaaggtcccggctgcactttatccactgcctggtaccaaaccctgtggtggaaagcaggagtgggcaggaatctccaccaccaccgcagcctggtagagacaagcctggggcaggtggacctctggccctggatatcccagcactgagggtccagcttgctgggttccacatcctggaggctctgcgtctgcataggacaggtaagagacagctaggacacagcaccttgtctctgactcctgggacatgtccacccaccagtggcagccaagggatgggagcccctgccatgtgctaggagcttcacacccagcatcctgg

SEQ ID NO: 15728 - DNA, 500 bp, Homo sapiens
gaacacctctgggaagtgccaatcaaatatagtctcttaaattaacaaatggagaaactaaggtcccaagagatgagtccatgcagcaagttagtagccaggctaggaagcaggaccctgcactcctgtctaggggtttagggaactgggctgggtcttctcatctggactctgtgctcttctcctgcctgctcctacctccctaggctatgctgaccacatggggctcactcgcttccgccggcaattccaggtgctggacgctccactcctgaagaagctcatgtcgacctccgagggaatagatgaaaggaaggtaggtggagcacatgcgagaggggtgaaggccctagatatggatatgttggttattggacatgttccaaggctgggcacggtgagtggctcatgcctgtaatctcagtgctttgggatacccaggtgggtggatcacttgagtccaggagtacaagaccagcctgggcaatatgactttgact

SEQ ID NO: 15729 - DNA, 500 bp, Homo sapiens
gaggatgaaacaaattggtgtgtgtatgaaggcagagtggatggcacacagtaggtgctcagcacctgcaccttcctgtgtgaggtggggctctgttagccaaagctcacagacatgtggggtcatcctccgtcctggcgcatcagccatcgagccagcttgactttcccctttaggatcctcctaccttctatgctgtctaacttctctctaattttttccccaggccgtggaggagctcctggagaccctggatctggaaaagaaggcggtggctgtggggcacagccaagtgagtagagctgctttcttacaacattcgcccatcacatcagggacccagagatgacctgattcttgtcctacctcaattgtctattatctctgtacgtctcctttttcccaaactgaaggtagagctaatgattttctgccctgcctatcttacaaggtcctggagagacaatgtcataatatgagttgaaatcacactgggaaat

SEQ ID NO: 15730 - DNA, 500 bp, Homo sapiens
aatttagactcccccacctcccacttaaagggcaactgccaacaaatattgcaggtgggtgcaagagaagtggggtctgatttgcaagcacccccccattgtagacagccttcttcagcagaggactcacctgaaaccttccctctccccaggtttttctcaaggcaggtgtgatctccaggcttgagaagcagcgagagaagctggtatctcagagcatcgttctcttccaggcggcttgcaagggctttctgtctcgccaggaattcaagaagctgaaggtactgcatgccgttcccatgaggagtctgatccaacgggtctggagcgggcatagggtctgcctgtctttcaggatgataccggtgcaccgggtccaaggatccaacctgagcagtgagactttaagtgaggctttgcaagatgttatgactgtttctgggacattgacatcaaattatccatgaggtcggccttgcgctaggtagccatgaggttgt

SEQ ID NO: 15731 - DNA, 500 bp, Homo sapiens
taaggtatccagtcccttccaccgggaaataaccccacttcctccagcccctttgctaccctctgcctcctctccttcctttatcctcacctgggttggaaaggaccctccagtctgtgttctccttccctgcagattcgccgactggctgcacagtgcatccagaagaatgtggctgtgttcctcgcagtcaaggactggccatggtggcagctgcttggttccctccagcctctacttagtgccaccattggaactgagcagctccgagccaaggaggtcagtctatgtggcaggcagggtgctgggtggctactccccacaccctgctcctcctgtttgcatctagcaccctgtgcccctattcctgaatgttcttgatctaggaatgctcagcccaacagccttgatgccccttccagatgttcctctgcctccaacaacacagacaatcctccatcccatgcccagctcctctctaggctgtgggtgtttagaga

SEQ ID NO: 15732 - DNA, 500 bp, Homo sapiens
cactgtgcccagccaaaacctactttttacaagcaattttgaaatatacagtgcaccattatttgttatagtcaccattctgtgcaatagattgctaaggtttattcctcctaacggaaactttgtgccgtttgctcactcctaacacaggtggaacttaatctctggcctggaatggtttctgttcatgtgtttgtttttgtaggaggagcttacaacgctaagacggaagctagaaaaatcagagaagttgcggaatgaactccggcagaacacagatctgctagaaagcaaggtatccccatccctcctcttgggtccttgtggggggtctttatgtatgtgagatctgtttaatggggagaacaatgatatgcctgaaagcatgctaattgctttacaagcaccccagaattacctgtgaggcacatgctgttattgaacccattttacagtggaggaaattgaggccctgggatattaagtatcttcctcgaggc

SEQ ID NO: 15733 - DNA, 500 bp, Homo sapiens
accaataaaattctgaagtccatcctcttaacgagttgattatactcaagggttgctttcccatgatagtgatttgtccaaaggcgatcctgtgcatggggagagaagggttggtggctccatcgagtgaccgttccttgatcaccccattccccatctcagattgctgacttgacctctgaccttgccgatgagcgcttcaaaggtgatgtggcctgccaggtgctggagagtgagcgggcagagcggctacaggccttccgggaggtccaggagctcaaggtgagtggtcaggggtggccaggggtggctgaacacggtggctaaaaatggttgggtctgctccccgaccctctcattggagatcagtaagcttaagcaagatgcacaggttgactgactgctgggctcaaggtcctgggggacacttaggtctcctaaggcttggccttgggggtgttatgggtggatagtccctggctagagaggcgaataggaga

SEQ ID NO: 15734 - DNA, 500 bp, Homo sapiens
atttgggtgagaaatatgccgaaggtggctagcccatggtcctggattctgcatggctcagggctgtgcagagggtggccaatccgagccttggaagcacttcatgggtaagatgaccagcccatgtcttctgtccagctctagtttagaccttgagccctttcttctagagcaagcatgaacaagtccagaaaaaactgggagatgtgaataaacagttggaagaagcccagcagaaaattcagttgaatgacttggaaaggaatcccactggaggaggtgagcagcctgggacccttggggctggaaggtgatggacaaagttgtctttcccatttattcagtcactcatagagcactttttaggtgctagatattgcatgaggggctgcgactttggcagagcaaacaggcacagcgtactctcttggagcttacagtctaatggaataagcagatattaatcagataatccaacaatatcccaggtaacaaattat

SEQ ID NO: 15735 - DNA, 500 bp, Homo sapiens
ggaagcgttatttaaaactcagagttaaagcatagtttcttggtccaaggttgaggctcaagggctctgtgaatattgtgaaattgcatgccaagagccaagaaagtggaggagagccactcacactcttgccttacactcatttggcctcttatcctggtctccctgactccgttaaacagcagacgagtggcagatgcgcttcgactgtgctcagatggagaacgagttcctcagaaagcgtctgcagcaatgcgaggagaggctggactcggagctgacagccaggaaagagctggagcaaaaggtaagatgtggggatagtctgggccacagaagtgttagagagtgggcaggctctcacctccactgtgggtgatcgaggtattagctgagcctgaagagggaggaagaggacacaaaccccttaaggtttttccatctccactattattacaaatgctggtcactgtgagacatgaaaaatattgtctgtacat

SEQ ID NO: 15736 - DNA, 500 bp, Homo sapiens
aagtagcttcctggaggtgaccctggaggaaggtagtcaagacagggtctccccattccagcatctgctgttttctcattacacaccttggaaatagcaactccttgaaatacaaagtaaaaagctcgttccatgcccacagagccgggtaattcattctattactcttacagcttggggagttgcaaagtgcttatgacggggccaagaagatggctcaccaactgaagaggaagtgccaccatcttacctgtgaccttgaggatacctgcgtcctgctagagaaccaacaaagtcgaaaccatgagctggagaagaagcagaagaagtgagttgcatctctcaccatcacctgggctgccagggtgggctacattggagctggcgttttctggggtatccaggttctcctaactccctcacttcaactcccttgttttgctctaatcttcctccctgtcccgtcacaccttattcctgtatggttctcccaagaatcc

SEQ ID NO: 15737 - DNA, 500 bp, Homo sapiens
aagcattgagaaaaacttccaacttctcatactttctctatctctcttcttccttttgctctctttctaatggttcttgggaaactagcggcctctctgcagcccctccctgcccctgcctcaatcactcccctgcccacctgcctacggggccctgacacgtgctctgctttgcacaggtttgacctgcagctggcccaggccctaggtgagtcagtgtttgagaagggtctccgtgagaaagtgacccaggagaacaccagtgtccggtgggagctaggccagcttcagcagcagctgaaggtaagggatgggggacacagagctatcttggctcttggtggctaaatctcgggaaactgcatcgtgcacctgctgcaaatggtgacagagagaaaacttcacaagggtatcctggtctgtcaagcagctgaatcccagtgtgtcttaataaaatagcaaatggtggctggtaaattgataatcagactttgagcaag

SEQ ID NO: 15738 - DNA, 500 bp, Homo sapiens
tggggtccaggtggaaatggcaggcattggaaagtggaaaacgccactccagccccagttggttgtagaggtatccctgggggaggagggaggcatactcatgtgactccagatctctgtcctctttgtctctgtagcaaaaggagcaggaagcctcacagctgaagcagcaggtggagatgctacaggaccataaacgggagctgctggggtcaccctctctgggggaaaattgcgttgctggcttgaaggagaggctctggaagttggaatccagcgcccttgagcaacagaaaatccagagccagcaggaaaacaccatcaagcagctggagcaggtaggaaagccctgtctcagggcaacaccctgtcccatgtctccaatgcagagtgatgttattaaaatacaatgtgggtgcctcacttggctgctcctcatccttcaatggctccctattatcccagggaacctttaagctcctaagtctgacattcagatc

SEQ ID NO: 15739 - DNA, 500 bp, Homo sapiens
atggatagaggcaatatttaatctatttacccaccatttgtgatcttccaggatgcctagggcaataacttgactctcatttatgtattccaaaaatgagaaatgcaattggaatgccaaggatgacatggagggcttggagagttagagtgggtcaccctcacgtgctgtccttgctgcccccgcagctccgccagcggtttgagctggagatcgagcggatgaagcagatgcaccagaaggaccgtgaggaccaggaggaggaactggaggatgtccgtcagtcctgccagaagcgggtacgtgagcagtgaacacagctgtgcccttggatcctggcaggtctggcatggattccctcttccttagagcgaggagtaggacagggtctgggatctggggacaagctctttctgcaatcatctgagaccttagcttcgaagtgacttcaaaggtgtaggagcggaaatgcccatcttaaatatgatcttggaacttcc

SEQ ID NO: 15740 - DNA, 500 bp, Homo sapiens
tgttgtccagctcccaagcttttaggctcttaaattctcccacagagacactaccacccaatcactagggcagcctcatggaacaaagccacaagctctacattcctccgccttctgagggtccttgccttgtaggatgtgtctggatggagttcatttaccctgtgatgtttcttccctgtgtatccacagcttcatcagctggaaatgcagctggagcaagagtatgaagagaagcagatggtcctccatgagaagcaagatttggaaggcttgatcggaaccctctgtgaccaggtaagggggagacattggcagacattcagaggagtatctcagggacctatttgagagatgggctcatggagagaacagcctgagggataccctctcctccatcagctctgttcccaccatattcactggctcttcaaaggagaccttcaggtgcctgcaaacagcagggtttttgtaagaacccatggggaataaagagagtg

SEQ ID NO: 15741 - DNA, 500 bp, Homo sapiens
gttggtgccaatcccatttctcagttgaggaaactgaggctcggagaggagaatggtcttgtccaaggtcacacggtgtgagtggcagaggcaggatttaaaccagggaacctgattccggaaaacttagaccctggccactgctttgccacctaagctcatgggtctccctttggctttcagattggccatcgggactttgatgtggagaagcgacttcggagagacctcaggaggacacatgcactgttgtcagacgtgcagctccttctgggcaccatggaggatggcaagacatcagtcagcaaggaggagctggagaaagtgcacagccaggtgggtgtcacgggatccccttgagaatcaggctggggaggatgctacgacctgcagagaattgctgtccctcccaggtatgagcggaaccatggtgccaacctccaactttcacagatgtgcagggagatggggggcatttcagggctgtgagggtcatgtgg

SEQ ID NO: 15742 - DNA, 500 bp, Homo sapiens
ttgcctcgcctcgcctcccctcccctctcccttcccctccgctctcttcccccctcccctcccacctcccctcccctcccctcccacctcccctcccctcccacctcccctcccctcccaccttccctcccctccccacctcccttcccctcttcccttctcattttcttttcttctcttctccacctcttgcctggtccagctggagcagagtgaagccaagtgtgaggaggccttgaagacgcagaaggtgctcacagcggacctggagagcatgcacagcgagctggagaacatgacgcggaacaagagcctggtacctgtcccttcctgcagctgcagggacctgggccagcataggcctctgggagctagtgtgggcctagtgtgcgctcagcactataggaagtatgaggacatttattgtaaacctaccaggtagcaccttggaggtacagacatccattgtaggccttttatgtgctcagctctgtaagagg

SEQ ID NO: 15743 - DNA, 500 bp, Homo sapiens
cacacacaccaagctgttatacctaccacatgcattggtaaccacagccactcttaaacattgatggtcactcacctcacacacctataggcaagcccctctttgctcttcctctggaccttgctgcccatccctcaccctctcaccttgccttgaccactgatctgcctcccccaggtggatgagcagctgtacaggctgcagtttgagaaggcggacctcctgaagcgcatcgatgaggaccaggatgacctgaatgagctgatgcagaagcacaaggacctcattgctcaggtagtgaatgagaccttggtggaagaagctcagggacttggggtggggtgaatggggaatgttgagaaggtgatgtggttggactactccctggtcttaacatcttggagggataagtgcacagagatagttaggaattgtgcatttcctgtggtcctaatggaggacaatgtcaccttcagatggtgtgtgcatctctggaggac

SEQ ID NO: 15744 - DNA, 500 bp, Homo sapiens
gcttatataattggagtgactcagcgaacattgaaatgaaagatggtgaggaggatgtgagaggtaatttttgggaaacagctattatcatagaagctctgagagatgtagacatctgtgggtggggaaagtagggattttcaggggtggtttcccagcaaggcttgtggactcagggtgatatatatacatttttttttttgtctcaccagtctgctgctgacattgggcagatccaagaactgcagctgcagctggaggaagccaagaaggagaagcacaagctacaagaacaagtatgtgctcagagccatcctatagttgtattagtcagggttttcttagagggacagaactaataggatgtgtgtgtgtgtgtgtgtgtgtgtgtgtgtgtatgagtttattgtttgtttatttgtttatttatttttgagacaagagtctcactctgtcacccagactggagtgaagtggcgcgatcttggctcactgcaacc

SEQ ID NO: 15745 - DNA, 500 bp, Homo sapiens
attgacacctggccattcttgcttgtgcagacatttaacatgcagcacacctgagtagagaaggaggtggtgtgaatagctcctcccaccctcccaggctgggtcctgcacatgtctctgtcctggtatcagggacaacagatgtccaatagacttctctcatacttacagctgcaggtggctcagatgcgcatcgagtacctggaacagtccaccgtggatcgagccatcgtcagcaggcaggaggcggtcatctgtgacctagagaacaagacagagttccagaaggtgcagattaagagatttgaggtacgtagtgattcataaatagtgcctgggccaagagcagggagagcttttgtgtaagcttcatccatccttctactactcatctatctactcacatgccttcatctagatatacattactcatccacttctcacccaagctccctccctccttccatcatagcatcatccctcaagccacctacccattt

SEQ ID NO: 15746 - DNA, 500 bp, Homo sapiens
ttttgcatgttgttaattcttcatttttgtagcagacatcagtattcttatcctgattatgaaaacacaggaaactcggcaaaggatttatcttcctgaggctcccttgtttcatacccctggcctccaactccaaggtgggcatgtgtctctgcccctcccaggtcctggtgatccggcttcgggacagcctgatcaagatgggggaggagctttcacaggcggccacctccgagtcccagcagcgggagagcagccagtactaccagcggcgcctggaagagctgaaggccgacatggaagagctggtgcagcgggaggcagaggccagccggcggtgcatggagctggtgagtcctgtccccatcatgggctcttagcgactgagggtttgcaatgtggtagacccccctttcttaagacttctgaatgggagactcataggtttgggtcctgggcctcaggggtgtgcggaaagccaggagaaacaagaaggggag

SEQ ID NO: 15747 - DNA, 500 bp, Homo sapiens
aacttggaacacctggttgaggatcccataaatctgtccgcagagagagcctctcacggagaacttaccacttcataggtgctcagtgaacactaggctcagcctggggcgtgtctcttccccagtgcatgcatgggtggtgcatttcttgcccaaggccaacgtgtgtttgcatcttctgtccccaggagaagtacgtggaggaacttgcagcagtgaggcaaaccctccagacagacctggagacatccattcggcggattgccgacctgcaggctgccttggaagaagtggcatccagtgacagtgatactgagaggtaacttgctaggggctcggcggggctgggcgcagcaggtgggcggcatcctggggagctctatgccctttagccgggctggggccacattcactgggaaacccaaagatgttcgggggctggaggcacccctcgtttacttgggtaaggagagactggatgttgccctgctggtttaacc

SEQ ID NO: 15748 - DNA, 500 bp, Homo sapiens
tcttcacaagggttatctcacttactctgctccacaacagagccccattatttgccacattttaggaaggaagaaaggaagctcagggaaggcaagtgacttccctgagatcacacaggggcaaaggttggaagtgggattcacactcatgtctgtctaacgtcaataaccatgcttccaagcccctggcagcacgaggataacacactctttcttgtgcctcttactagtgtccagacggcagtggattgtggcagcagcggccgaaaagagatgtaagttaaccccaggtagaactgagcagctcacaagggtgagcccctggctctctctgtccagtttgcagagggaacatccatgtccacttggagaattatcagtgatgcccatgagactaatgccttcatggtcataacctatagcactaggaacatcgtattgaactgccctagttcttttagacagaaagaagcctatgccttctcatgctactgtcctca

SEQ ID NO: 15749 - DNA, 500 bp, Homo sapiens
aatctcagtaattccatctgtgtaactgtgacagcactggctcctacctctctgggatggcgagtgaggttatgcaggtatatcacttagcacaatgcctggcttatgctatgggtgaatatctaattattgctgttactgtgattgtcattgtgctgatggtgtcctgcaatcttattctagggataacgtctccatcctcagctcccagccagagggcagcctgcagtcctggttgagctgtactctgtccctggccacagatactatgaggactccttctcgacagtcagccaccagcagccgcatcctcagccccaggtaagagtatctccttgctgcctctggatggctaatagcttgaagaatctcagactttgaaagttgttgttcaagtctttcattgtctctggcataggcaaaaacaagcatggtcctgaaagtctggggtataactctgccacttcctagctgtgtgactttaggcagatcctttaccc

SEQ ID NO: 15750 - DNA, 500 bp, Homo sapiens
tctccccatttaccagacgactggggcctccacactaaggaggggcagggctggcagtgacgagggaaacctctcgctgagggttggggcaaagtcacccctggaaatcgaaggggccgctggtggtctcttgaggtccaccagcctcaaatgcatctcttcagacggtgttgggggcacaaccctactccccgaaaagtcgaaaacccaattcagttcctgcgagtccctcttagaatccagaccgagcatggggagaaaactgagctctccgaccacacccagggacatgctgttgtcgcccacactgcgtcctcggaggcggtgtctggagtcctctgtggacgatgcgggctgtccagaccttggaaaggagccgcttgttttccagaaccgccagtttgcccacctgatggaggaacctctaggcagtgacccattcagctggaaactcccaagcctcgactacgaacgcaagaccaaagtggacttcgatgact

SEQ ID NO: 15751 - DNA, 500 bp, Homo sapiens
gatcacttgaacccaggagctggaggctgcagtgagctatgattgcaccactgcacactagcctgagtgacaaagtgagaccctgcctccagaaaaagaaaaaccttacccatcctttgtcccattcatcaactctgacctatgtttgcttccagcctccttgaagctgcccttgaagacttcccgactctacaataacttggagacagagagactggccaggcctccccggtggccagagccagccagcatggccaccctcaagaggcgagatgagcccacagaggcatatcctgcggggatgctgggctcccagtgtggttggcctgaacaaaataaagtgttgactcctgggcatctgtgccttctctatggccttgctacctgggattccagagagttgatggggtgcagataggggtaggactgttagaatagaaccaacccaaactgtgtgtagtttggggtgtatacttctatttctcttcctacatgtctac

SEQ ID NO: 15752 - DNA, 1000 bp, Homo sapiens
tgatttttttttttttttttgagatggagtctctctctgtcacccaggctggagtgcagtggcgcgatctcggcttactgcaagctccgcctgtagctgggactacaggcgcccaccaccacgcccggctaattttgtttttgtatttttagtagagacggggtttcactgtgttagccaggatggtctcaatctcctgacctcgtgatatgcccacctcggcttcccaaagtgccgggattacagacgtgagccaccgtgccaggcccaaagcacttttttatagcccctagtttgctgttgtgtctgtttcctctacggcccgcacagcctgggtttgaattctggctctccatggccttgggcaagttggttaactttttgtgtctcaatttccccacttgtaaagtggggctggggaaaaaccctacctcatagggaacattaagtgagttcatgaaagccctcggtgtgtggcatgcgataaccactacctaagcataaggtatgtttacatgcactggttgtttaccacgacgcaccagcattcattcaagttattttcttccagagtctgcctggaatgtagaaccggccagctctcctcctcaaacagttcctgcaacctctggttatctgtgtgggcagaggcgggagtgtgggtgtgtggccctgccctgggacagggatgacgagagagcatgtgcttgtgtccagagctgtccccttccctgctcaggggccaccaaatatgtccatggtctctgctgcctggtcaacggccaccccgggctgccgtctcctggccagacctggagctcacaagctaattttagaaatgactggtcgactcagctgctgctatcacattggcccagaaggagggtggggggaggacgggtcggggaggggcagtaaggggaagggatgtgtgtcggtgtgtgtggagagggtgctccttcgctcctgctttcccggctcggtggggtcccttcgcggc
